United States Patent Application Publication US 2026/0151510 A1 - sequence listing, part 2

SEQ ID NO: 41291 - protein, 9 aa, synthetic construct
PTQGSSKLR

SEQ ID NO: 41292 - protein, 9 aa, synthetic construct
PTQGSSKLH

SEQ ID NO: 41293 - protein, 9 aa, synthetic construct
PTQGSTRLY

SEQ ID NO: 41294 - protein, 9 aa, synthetic construct
PTQGSTRLR

SEQ ID NO: 41295 - protein, 9 aa, synthetic construct
PTQGSTRLF

SEQ ID NO: 41296 - protein, 9 aa, synthetic construct
PTQGSTRVF

SEQ ID NO: 41297 - protein, 9 aa, synthetic construct
PTQGGSRLR

SEQ ID NO: 41298 - protein, 9 aa, synthetic construct
PTNATIKVR

SEQ ID NO: 41299 - protein, 9 aa, synthetic construct
PTNATIKVK

SEQ ID NO: 41300 - protein, 9 aa, synthetic construct
PTQGGTRVK

SEQ ID NO: 41301 - protein, 9 aa, synthetic construct
PTNASVRLF

SEQ ID NO: 41302 - protein, 9 aa, synthetic construct
PLNGVIKLY

SEQ ID NO: 41303 - protein, 9 aa, synthetic construct
PLNGVIKLK

SEQ ID NO: 41304 - protein, 9 aa, synthetic construct
PTNASIRLR

SEQ ID NO: 41305 - protein, 9 aa, synthetic construct
PTNASIRLH

SEQ ID NO: 41306 - protein, 9 aa, synthetic construct
PLNGVIKVK

SEQ ID NO: 41307 - protein, 9 aa, synthetic construct
PTNAVLHVH

SEQ ID NO: 41308 - protein, 9 aa, synthetic construct
PTNAVLKVR

SEQ ID NO: 41309 - protein, 9 aa, synthetic construct
PLNGVGRLK

SEQ ID NO: 41310 - protein, 9 aa, synthetic construct
PTNAGLRVY

SEQ ID NO: 41311 - protein, 9 aa, synthetic construct
PTNAGAKVR

SEQ ID NO: 41312 - protein, 9 aa, synthetic construct
PTNAGIRVR

SEQ ID NO: 41313 - protein, 9 aa, synthetic construct
PTQGAVRVR

SEQ ID NO: 41314 - protein, 9 aa, synthetic construct
PTQGAVKLK

SEQ ID NO: 41315 - protein, 9 aa, synthetic construct
PTQGAGRVR

SEQ ID NO: 41316 - protein, 9 aa, synthetic construct
PTQGVVRLK

SEQ ID NO: 41317 - protein, 9 aa, synthetic construct
PTQGVAKLK

SEQ ID NO: 41318 - protein, 9 aa, synthetic construct
PTQGGVKVK

SEQ ID NO: 41319 - protein, 9 aa, synthetic construct
PTQGGLHLR

SEQ ID NO: 41320 - protein, 9 aa, synthetic construct
PTQGGLHVK

SEQ ID NO: 41321 - protein, 9 aa, synthetic construct
PTQGGLHVF

SEQ ID NO: 41322 - protein, 9 aa, synthetic construct
PTQGGAKVR

SEQ ID NO: 41323 - protein, 9 aa, synthetic construct
PTQGGIRLR

SEQ ID NO: 41324 - protein, 9 aa, synthetic construct
PTQGGIRVR

SEQ ID NO: 41325 - protein, 9 aa, synthetic construct
PTQGGGRLR

SEQ ID NO: 41326 - protein, 9 aa, synthetic construct
PTQGGGKVR

SEQ ID NO: 41327 - protein, 9 aa, synthetic construct
PTQAAVKVK

SEQ ID NO: 41328 - protein, 9 aa, synthetic construct
PTQAALKVK

SEQ ID NO: 41329 - protein, 9 aa, synthetic construct
PLNGGAKVR

SEQ ID NO: 41330 - protein, 9 aa, synthetic construct
PTQAAGRLK

SEQ ID NO: 41331 - protein, 9 aa, synthetic construct
PTQAAGRVR

SEQ ID NO: 41332 - protein, 9 aa, synthetic construct
PLNGGIRVY

SEQ ID NO: 41333 - protein, 9 aa, synthetic construct
PTQASVHLH

SEQ ID NO: 41334 - protein, 9 aa, synthetic construct
PTQASLHLR

SEQ ID NO: 41335 - protein, 9 aa, synthetic construct
PTQASIRVF

SEQ ID NO: 41336 - protein, 9 aa, synthetic construct
PTQASGRLR

SEQ ID NO: 41337 - protein, 9 aa, synthetic construct
PTQAVVRLF

SEQ ID NO: 41338 - protein, 9 aa, synthetic construct
PTQAVIHLY

SEQ ID NO: 41339 - protein, 9 aa, synthetic construct
PTQAGVHVY

SEQ ID NO: 41340 - protein, 9 aa, synthetic construct
PTQAGVHVH

SEQ ID NO: 41341 - protein, 9 aa, synthetic construct
PTQAGLKLH

SEQ ID NO: 41342 - protein, 9 aa, synthetic construct
PTQAGARVR

SEQ ID NO: 41343 - protein, 9 aa, synthetic construct
PTQAGAKLR

SEQ ID NO: 41344 - protein, 9 aa, synthetic construct
PTQAGIRVR

SEQ ID NO: 41345 - protein, 9 aa, synthetic construct
PTPGALHLY

SEQ ID NO: 41346 - protein, 9 aa, synthetic construct
PTPGALRLF

SEQ ID NO: 41347 - protein, 9 aa, synthetic construct
PTPGALRVR

SEQ ID NO: 41348 - protein, 9 aa, synthetic construct
PTPGAARLK

SEQ ID NO: 41349 - protein, 9 aa, synthetic construct
PTPGTVRLR

SEQ ID NO: 41350 - protein, 9 aa, synthetic construct
PTPGTLKLK

SEQ ID NO: 41351 - protein, 9 aa, synthetic construct
PTPGTARLK

SEQ ID NO: 41352 - protein, 9 aa, synthetic construct
PTPGSIRVR

SEQ ID NO: 41353 - protein, 9 aa, synthetic construct
PTPGSIRVK

SEQ ID NO: 41354 - protein, 9 aa, synthetic construct
PTPGVVRLK

SEQ ID NO: 41355 - protein, 9 aa, synthetic construct
PTPGVARLH

SEQ ID NO: 41356 - protein, 9 aa, synthetic construct
PTPGVGKVK

SEQ ID NO: 41357 - protein, 9 aa, synthetic construct
PTPGGVRVR

SEQ ID NO: 41358 - protein, 9 aa, synthetic construct
PTPGGLRLF

SEQ ID NO: 41359 - protein, 9 aa, synthetic construct
PTPGGLRVH

SEQ ID NO: 41360 - protein, 9 aa, synthetic construct
PTPGGAKVR

SEQ ID NO: 41361 - protein, 9 aa, synthetic construct
PTPGGIRVR

SEQ ID NO: 41362 - protein, 9 aa, synthetic construct
PLNAAARLK

SEQ ID NO: 41363 - protein, 9 aa, synthetic construct
PTPAAARVK

SEQ ID NO: 41364 - protein, 9 aa, synthetic construct
PTPAAIKVK

SEQ ID NO: 41365 - protein, 9 aa, synthetic construct
PTPAAGRVR

SEQ ID NO: 41366 - protein, 9 aa, synthetic construct
PTPAAGKLR

SEQ ID NO: 41367 - protein, 9 aa, synthetic construct
PTPATARLK

SEQ ID NO: 41368 - protein, 9 aa, synthetic construct
PTPATARVK

SEQ ID NO: 41369 - protein, 9 aa, synthetic construct
PTPASVRLK

SEQ ID NO: 41370 - protein, 9 aa, synthetic construct
PTPASVRVK

SEQ ID NO: 41371 - protein, 9 aa, synthetic construct
PTPASVKLK

SEQ ID NO: 41372 - protein, 9 aa, synthetic construct
PTPASARLR

SEQ ID NO: 41373 - protein, 9 aa, synthetic construct
PTPASIRVR

SEQ ID NO: 41374 - protein, 9 aa, synthetic construct
PTPASIKVR

SEQ ID NO: 41375 - protein, 9 aa, synthetic construct
PLNAAIKVK

SEQ ID NO: 41376 - protein, 9 aa, synthetic construct
PTPAVLHLH

SEQ ID NO: 41377 - protein, 9 aa, synthetic construct
PTPAVLKVR

SEQ ID NO: 41378 - protein, 9 aa, synthetic construct
PTPAVIRVF

SEQ ID NO: 41379 - protein, 9 aa, synthetic construct
PLNAAGRLR

SEQ ID NO: 41380 - protein, 9 aa, synthetic construct
PTPAGVHVF

SEQ ID NO: 41381 - protein, 9 aa, synthetic construct
PTPAGVRLH

SEQ ID NO: 41382 - protein, 9 aa, synthetic construct
PTPAGVRVR

SEQ ID NO: 41383 - protein, 9 aa, synthetic construct
PLNAAGKLK

SEQ ID NO: 41384 - protein, 9 aa, synthetic construct
PTPAGIRVR

SEQ ID NO: 41385 - protein, 9 aa, synthetic construct
PLNAAGKVK

SEQ ID NO: 41386 - protein, 9 aa, synthetic construct
PSNGAVKVK

SEQ ID NO: 41387 - protein, 9 aa, synthetic construct
PSNGTLRLK

SEQ ID NO: 41388 - protein, 9 aa, synthetic construct
PSNGTGKLK

SEQ ID NO: 41389 - protein, 9 aa, synthetic construct
PSNGSVKVK

SEQ ID NO: 41390 - protein, 9 aa, synthetic construct
PSNGSLKLF

SEQ ID NO: 41391 - protein, 9 aa, synthetic construct
PSNGSLKVY

SEQ ID NO: 41392 - protein, 9 aa, synthetic construct
PSNGSAKVR

SEQ ID NO: 41393 - protein, 9 aa, synthetic construct
PSNGSIHLF

SEQ ID NO: 41394 - protein, 9 aa, synthetic construct
PSNGSIRLR

SEQ ID NO: 41395 - protein, 9 aa, synthetic construct
PSNGSGRLH

SEQ ID NO: 41396 - protein, 9 aa, synthetic construct
PSNGSGKVR

SEQ ID NO: 41397 - protein, 9 aa, synthetic construct
PSNGSGKVK

SEQ ID NO: 41398 - protein, 9 aa, synthetic construct
PSNGVVKVK

SEQ ID NO: 41399 - protein, 9 aa, synthetic construct
PSNGVLHLF

SEQ ID NO: 41400 - protein, 9 aa, synthetic construct
PSNGGVKVR

SEQ ID NO: 41401 - protein, 9 aa, synthetic construct
PSNGGLHLH

SEQ ID NO: 41402 - protein, 9 aa, synthetic construct
PSNGGLRLH

SEQ ID NO: 41403 - protein, 9 aa, synthetic construct
PSNGGAKVR

SEQ ID NO: 41404 - protein, 9 aa, synthetic construct
PSNGGIRVY

SEQ ID NO: 41405 - protein, 9 aa, synthetic construct
PSNAAVHLF

SEQ ID NO: 41406 - protein, 9 aa, synthetic construct
PSNAAARLK

SEQ ID NO: 41407 - protein, 9 aa, synthetic construct
PSNAAAKVR

SEQ ID NO: 41408 - protein, 9 aa, synthetic construct
PSNATVRLH

SEQ ID NO: 41409 - protein, 9 aa, synthetic construct
PSNATARLK

SEQ ID NO: 41410 - protein, 9 aa, synthetic construct
PSNATARVK

SEQ ID NO: 41411 - protein, 9 aa, synthetic construct
PSNATAKVK

SEQ ID NO: 41412 - protein, 9 aa, synthetic construct
PSNATGKVR

SEQ ID NO: 41413 - protein, 9 aa, synthetic construct
PSNASVKVY

SEQ ID NO: 41414 - protein, 9 aa, synthetic construct
PSNASGKVR

SEQ ID NO: 41415 - protein, 9 aa, synthetic construct
PSNAVAKVY

SEQ ID NO: 41416 - protein, 9 aa, synthetic construct
PSQGVAHLY

SEQ ID NO: 41417 - protein, 9 aa, synthetic construct
PSQATGKVR

SEQ ID NO: 41418 - protein, 9 aa, synthetic construct
PSPGTVRLF

SEQ ID NO: 41419 - protein, 9 aa, synthetic construct
PSPGTLRLK

SEQ ID NO: 41420 - protein, 9 aa, synthetic construct
PSPGVLRLY

SEQ ID NO: 41421 - protein, 9 aa, synthetic construct
PSPGVIHLY

SEQ ID NO: 41422 - protein, 9 aa, synthetic construct
PLNAVIKLK

SEQ ID NO: 41423 - protein, 9 aa, synthetic construct
PLNAVGKLK

SEQ ID NO: 41424 - protein, 9 aa, synthetic construct
PANGTGKVR

SEQ ID NO: 41425 - protein, 9 aa, synthetic construct
PANGVLRLY

SEQ ID NO: 41426 - protein, 9 aa, synthetic construct
PANATGKVR

SEQ ID NO: 41427 - protein, 9 aa, synthetic construct
PAPGVLRLY

SEQ ID NO: 41428 - protein, 9 aa, synthetic construct
PVNGTGKVR

SEQ ID NO: 41429 - protein, 9 aa, synthetic construct
PVNATLRVY

SEQ ID NO: 41430 - protein, 9 aa, synthetic construct
PVNATGKLR

SEQ ID NO: 41431 - protein, 9 aa, synthetic construct
PVNASGKVR

SEQ ID NO: 41432 - protein, 9 aa, synthetic construct
PLQGSGHLH

SEQ ID NO: 41433 - protein, 9 aa, synthetic construct
PLQGVLHVF

SEQ ID NO: 41434 - protein, 9 aa, synthetic construct
PVQATVRLF

SEQ ID NO: 41435 - protein, 9 aa, synthetic construct
PVPGAGKVR

SEQ ID NO: 41436 - protein, 9 aa, synthetic construct
PVPGVLRLY

SEQ ID NO: 41437 - protein, 9 aa, synthetic construct
PVPAVAKLY

SEQ ID NO: 41438 - protein, 9 aa, synthetic construct
PIQGGIRLK

SEQ ID NO: 41439 - protein, 9 aa, synthetic construct
PIPGTLRLK

SEQ ID NO: 41440 - protein, 9 aa, synthetic construct
PIPGVLRLY

SEQ ID NO: 41441 - protein, 9 aa, synthetic construct
PIPATVKVR

SEQ ID NO: 41442 - protein, 9 aa, synthetic construct
PLQASIRLH

SEQ ID NO: 41443 - protein, 9 aa, synthetic construct
PLQAVVHLF

SEQ ID NO: 41444 - protein, 9 aa, synthetic construct
GLNGTGHVR

SEQ ID NO: 41445 - protein, 9 aa, synthetic construct
GLNGTGKVR

SEQ ID NO: 41446 - protein, 9 aa, synthetic construct
GLNGSARVF

SEQ ID NO: 41447 - protein, 9 aa, synthetic construct
GLNGSAKVH

SEQ ID NO: 41448 - protein, 9 aa, synthetic construct
PLQAVLHVF

SEQ ID NO: 41449 - protein, 9 aa, synthetic construct
GLNGSIRLH

SEQ ID NO: 41450 - protein, 9 aa, synthetic construct
GLNGSGKVH

SEQ ID NO: 41451 - protein, 9 aa, synthetic construct
GLNGVLHVF

SEQ ID NO: 41452 - protein, 9 aa, synthetic construct
GLNGVAKLY

SEQ ID NO: 41453 - protein, 9 aa, synthetic construct
GLNAAGKVR

SEQ ID NO: 41454 - protein, 9 aa, synthetic construct
GLNATGKVR

SEQ ID NO: 41455 - protein, 9 aa, synthetic construct
GLNAVAKLY

SEQ ID NO: 41456 - protein, 9 aa, synthetic construct
GLQGAIHVY

SEQ ID NO: 41457 - protein, 9 aa, synthetic construct
GLQGTIHVF

SEQ ID NO: 41458 - protein, 9 aa, synthetic construct
GLQGSARVH

SEQ ID NO: 41459 - protein, 9 aa, synthetic construct
GLQGSIRLK

SEQ ID NO: 41460 - protein, 9 aa, synthetic construct
GLQGSGRVY

SEQ ID NO: 41461 - protein, 9 aa, synthetic construct
GLQGGLHLK

SEQ ID NO: 41462 - protein, 9 aa, synthetic construct
GLQGGIRLK

SEQ ID NO: 41463 - protein, 9 aa, synthetic construct
GLQATAHVK

SEQ ID NO: 41464 - protein, 9 aa, synthetic construct
GLQASVKLF

SEQ ID NO: 41465 - protein, 9 aa, synthetic construct
PLNGTGKVR

SEQ ID NO: 41466 - protein, 9 aa, synthetic construct
GLQAVVHLY

SEQ ID NO: 41467 - protein, 9 aa, synthetic construct
GLQAVVHLH

SEQ ID NO: 41468 - protein, 9 aa, synthetic construct
GLQAVLHVF

SEQ ID NO: 41469 - protein, 9 aa, synthetic construct
GLQAVAHVF

SEQ ID NO: 41470 - protein, 9 aa, synthetic construct
GLPGVVHVF

SEQ ID NO: 41471 - protein, 9 aa, synthetic construct
GLPGVLHVF

SEQ ID NO: 41472 - protein, 9 aa, synthetic construct
GLPAVAKLY

SEQ ID NO: 41473 - protein, 9 aa, synthetic construct
PLPGTLRLK

SEQ ID NO: 41474 - protein, 9 aa, synthetic construct
GTNATLRVY

SEQ ID NO: 41475 - protein, 9 aa, synthetic construct
GTNATGKVR

SEQ ID NO: 41476 - protein, 9 aa, synthetic construct
GTNASGHLK

SEQ ID NO: 41477 - protein, 9 aa, synthetic construct
GTNAVLHVF

SEQ ID NO: 41478 - protein, 9 aa, synthetic construct
GTNAVAHVF

SEQ ID NO: 41479 - protein, 9 aa, synthetic construct
GTQGALRLH

SEQ ID NO: 41480 - protein, 9 aa, synthetic construct
GTQGSIRLK

SEQ ID NO: 41481 - protein, 9 aa, synthetic construct
GTQGVLRLY

SEQ ID NO: 41482 - protein, 9 aa, synthetic construct
GTPGTVRLY

SEQ ID NO: 41483 - protein, 9 aa, synthetic construct
GTPGTVRLF

SEQ ID NO: 41484 - protein, 9 aa, synthetic construct
GTPGTLRLK

SEQ ID NO: 41485 - protein, 9 aa, synthetic construct
PLPGVLHVF

SEQ ID NO: 41486 - protein, 9 aa, synthetic construct
GTPGVLHVF

SEQ ID NO: 41487 - protein, 9 aa, synthetic construct
GTPGVLRLY

SEQ ID NO: 41488 - protein, 9 aa, synthetic construct
GTPATVRLK

SEQ ID NO: 41489 - protein, 9 aa, synthetic construct
GTPATLRLK

SEQ ID NO: 41490 - protein, 9 aa, synthetic construct
GTPATLRLF

SEQ ID NO: 41491 - protein, 9 aa, synthetic construct
GTPAGGKVR

SEQ ID NO: 41492 - protein, 9 aa, synthetic construct
PLPGGVRLK

SEQ ID NO: 41493 - protein, 9 aa, synthetic construct
GSNGVLHLR

SEQ ID NO: 41494 - protein, 9 aa, synthetic construct
GSNAALRVY

SEQ ID NO: 41495 - protein, 9 aa, synthetic construct
GSNAAGKVR

SEQ ID NO: 41496 - protein, 9 aa, synthetic construct
GSNATVRVY

SEQ ID NO: 41497 - protein, 9 aa, synthetic construct
GSNATLRLY

SEQ ID NO: 41498 - protein, 9 aa, synthetic construct
GSNATLRVF

SEQ ID NO: 41499 - protein, 9 aa, synthetic construct
GSNATGKVR

SEQ ID NO: 41500 - protein, 9 aa, synthetic construct
GSNASLRVY

SEQ ID NO: 41501 - protein, 9 aa, synthetic construct
GSNAGGKLY

SEQ ID NO: 41502 - protein, 9 aa, synthetic construct
GSQGAIHVY

SEQ ID NO: 41503 - protein, 9 aa, synthetic construct
GSQGVLRLY

SEQ ID NO: 41504 - protein, 9 aa, synthetic construct
PLPATLRVF

SEQ ID NO: 41505 - protein, 9 aa, synthetic construct
GSPASVHVF

SEQ ID NO: 41506 - protein, 9 aa, synthetic construct
GANAAGKVR

SEQ ID NO: 41507 - protein, 9 aa, synthetic construct
GANATVKLF

SEQ ID NO: 41508 - protein, 9 aa, synthetic construct
GANATLRVY

SEQ ID NO: 41509 - protein, 9 aa, synthetic construct
GANATIRLH

SEQ ID NO: 41510 - protein, 9 aa, synthetic construct
GANATGKVR

SEQ ID NO: 41511 - protein, 9 aa, synthetic construct
GAPGAGHVH

SEQ ID NO: 41512 - protein, 9 aa, synthetic construct
PLNGSGKVR

SEQ ID NO: 41513 - protein, 9 aa, synthetic construct
GAPAVAKLY

SEQ ID NO: 41514 - protein, 9 aa, synthetic construct
GVQGTGKVR

SEQ ID NO: 41515 - protein, 9 aa, synthetic construct
GVQGSIRLK

SEQ ID NO: 41516 - protein, 9 aa, synthetic construct
GVQGVLRLY

SEQ ID NO: 41517 - protein, 9 aa, synthetic construct
GVQGVLRVY

SEQ ID NO: 41518 - protein, 9 aa, synthetic construct
GVQGGLHLK

SEQ ID NO: 41519 - protein, 9 aa, synthetic construct
GVQATVRVF

SEQ ID NO: 41520 - protein, 9 aa, synthetic construct
PTNGTGKVR

SEQ ID NO: 41521 - protein, 9 aa, synthetic construct
PLNGVLHVF

SEQ ID NO: 41522 - protein, 9 aa, synthetic construct
GINATLRVY

SEQ ID NO: 41523 - protein, 9 aa, synthetic construct
GIQGTIRLK

SEQ ID NO: 41524 - protein, 9 aa, synthetic construct
GIQGSIRVK

SEQ ID NO: 41525 - protein, 9 aa, synthetic construct
GIQASIRLK

SEQ ID NO: 41526 - protein, 9 aa, synthetic construct
GIPGTVRLK

SEQ ID NO: 41527 - protein, 9 aa, synthetic construct
GIPGTLRLR

SEQ ID NO: 41528 - protein, 9 aa, synthetic construct
GIPGSARVH

SEQ ID NO: 41529 - protein, 9 aa, synthetic construct
GIPAVVRVF

SEQ ID NO: 41530 - protein, 9 aa, synthetic construct
PLNGVTHLY

SEQ ID NO: 41531 - protein, 9 aa, synthetic construct
PLNGVTHLF

SEQ ID NO: 41532 - protein, 9 aa, synthetic construct
PLNGVTHVH

SEQ ID NO: 41533 - protein, 9 aa, synthetic construct
PLNGVTKVY

SEQ ID NO: 41534 - protein, 9 aa, synthetic construct
PTNGVSHVR

SEQ ID NO: 41535 - protein, 9 aa, synthetic construct
PTQGASKLF

SEQ ID NO: 41536 - protein, 9 aa, synthetic construct
PTQGATKLH

SEQ ID NO: 41537 - protein, 9 aa, synthetic construct
PTNATGKVR

SEQ ID NO: 41538 - protein, 9 aa, synthetic construct
PTQGALRLK

SEQ ID NO: 41539 - protein, 9 aa, synthetic construct
PTQGALRLF

SEQ ID NO: 41540 - protein, 9 aa, synthetic construct
PTQGTLRLH

SEQ ID NO: 41541 - protein, 9 aa, synthetic construct
PTQGGLHLY

SEQ ID NO: 41542 - protein, 9 aa, synthetic construct
PTPGVLRLH

SEQ ID NO: 41543 - protein, 9 aa, synthetic construct
PTPGVLRVF

SEQ ID NO: 41544 - protein, 9 aa, synthetic construct
PSNGVLRLY

SEQ ID NO: 41545 - protein, 9 aa, synthetic construct
PSNATIRVK

SEQ ID NO: 41546 - protein, 9 aa, synthetic construct
PLNATIRLH

SEQ ID NO: 41547 - protein, 9 aa, synthetic construct
PSNATGKLK

SEQ ID NO: 41548 - protein, 9 aa, synthetic construct
PLNATIRVR

SEQ ID NO: 41549 - protein, 9 aa, synthetic construct
PSNASVKLR

SEQ ID NO: 41550 - protein, 9 aa, synthetic construct
PSNASVKVK

SEQ ID NO: 41551 - protein, 9 aa, synthetic construct
PSNASLHLF

SEQ ID NO: 41552 - protein, 9 aa, synthetic construct
PSNASLRLY

SEQ ID NO: 41553 - protein, 9 aa, synthetic construct
PLNATIKLY

SEQ ID NO: 41554 - protein, 9 aa, synthetic construct
PLNATIKLF

SEQ ID NO: 41555 - protein, 9 aa, synthetic construct
PSNASIRLK

SEQ ID NO: 41556 - protein, 9 aa, synthetic construct
PSNASIRVH

SEQ ID NO: 41557 - protein, 9 aa, synthetic construct
PSNASGKLK

SEQ ID NO: 41558 - protein, 9 aa, synthetic construct
PSNAVVKLR

SEQ ID NO: 41559 - protein, 9 aa, synthetic construct
PSNAVVKLK

SEQ ID NO: 41560 - protein, 9 aa, synthetic construct
PSNAVLKLY

SEQ ID NO: 41561 - protein, 9 aa, synthetic construct
PSNAVLKLR

SEQ ID NO: 41562 - protein, 9 aa, synthetic construct
PSNAVLKVK

SEQ ID NO: 41563 - protein, 9 aa, synthetic construct
PSNAVARVY

SEQ ID NO: 41564 - protein, 9 aa, synthetic construct
PSNAVARVH

SEQ ID NO: 41565 - protein, 9 aa, synthetic construct
PSNAVIHLR

SEQ ID NO: 41566 - protein, 9 aa, synthetic construct
PSNAVIHLK

SEQ ID NO: 41567 - protein, 9 aa, synthetic construct
PSNAVIHLF

SEQ ID NO: 41568 - protein, 9 aa, synthetic construct
PSNAVIRLK

SEQ ID NO: 41569 - protein, 9 aa, synthetic construct
PLNATGRLK

SEQ ID NO: 41570 - protein, 9 aa, synthetic construct
PSNAVGRLR

SEQ ID NO: 41571 - protein, 9 aa, synthetic construct
PSNAVGRLH

SEQ ID NO: 41572 - protein, 9 aa, synthetic construct
PSNAVGRVK

SEQ ID NO: 41573 - protein, 9 aa, synthetic construct
PSNAVGKVR

SEQ ID NO: 41574 - protein, 9 aa, synthetic construct
PSNAGVKVR

SEQ ID NO: 41575 - protein, 9 aa, synthetic construct
PSNAGARLK

SEQ ID NO: 41576 - protein, 9 aa, synthetic construct
PSNAGAKVK

SEQ ID NO: 41577 - protein, 9 aa, synthetic construct
PSNAGIRVK

SEQ ID NO: 41578 - protein, 9 aa, synthetic construct
PSNAGIKLR

SEQ ID NO: 41579 - protein, 9 aa, synthetic construct
PSNAGGKLK

SEQ ID NO: 41580 - protein, 9 aa, synthetic construct
PSQGALRVK

SEQ ID NO: 41581 - protein, 9 aa, synthetic construct
PLNASVRLR

SEQ ID NO: 41582 - protein, 9 aa, synthetic construct
PLNASVRLK

SEQ ID NO: 41583 - protein, 9 aa, synthetic construct
PSQGTVKVK

SEQ ID NO: 41584 - protein, 9 aa, synthetic construct
PSQGTLRVR

SEQ ID NO: 41585 - protein, 9 aa, synthetic construct
PSQGTLKVR

SEQ ID NO: 41586 - protein, 9 aa, synthetic construct
PSQGTARVH

SEQ ID NO: 41587 - protein, 9 aa, synthetic construct
PSQGTIRVR

SEQ ID NO: 41588 - protein, 9 aa, synthetic construct
PSQGTGRLK

SEQ ID NO: 41589 - protein, 9 aa, synthetic construct
PSQGTGKVR

SEQ ID NO: 41590 - protein, 9 aa, synthetic construct
PLNGAIRVK

SEQ ID NO: 41591 - protein, 9 aa, synthetic construct
PSQGSVRLF

SEQ ID NO: 41592 - protein, 9 aa, synthetic construct
PSQGSLRLH

SEQ ID NO: 41593 - protein, 9 aa, synthetic construct
PSQGSLKLY

SEQ ID NO: 41594 - protein, 9 aa, synthetic construct
PSQGSAHLR

SEQ ID NO: 41595 - protein, 9 aa, synthetic construct
PSQGSAHVK

SEQ ID NO: 41596 - protein, 9 aa, synthetic construct
PLNASLHVH

SEQ ID NO: 41597 - protein, 9 aa, synthetic construct
PSQGSIRVY

SEQ ID NO: 41598 - protein, 9 aa, synthetic construct
PSQGSIKVY

SEQ ID NO: 41599 - protein, 9 aa, synthetic construct
PSQGSGHLY

SEQ ID NO: 41600 - protein, 9 aa, synthetic construct
PSQGSGRVY

SEQ ID NO: 41601 - protein, 9 aa, synthetic construct
PSQGSGKVY

SEQ ID NO: 41602 - protein, 9 aa, synthetic construct
PSQGSGKVK

SEQ ID NO: 41603 - protein, 9 aa, synthetic construct
PSQGVVKVK

SEQ ID NO: 41604 - protein, 9 aa, synthetic construct
PSQGVLHVY

SEQ ID NO: 41605 - protein, 9 aa, synthetic construct
PSQGVLHVR

SEQ ID NO: 41606 - protein, 9 aa, synthetic construct
PSQGVLHVF

SEQ ID NO: 41607 - protein, 9 aa, synthetic construct
PSQGVLRLF

SEQ ID NO: 41608 - protein, 9 aa, synthetic construct
PSQGVLKLF

SEQ ID NO: 41609 - protein, 9 aa, synthetic construct
PSQGVAHVH

SEQ ID NO: 41610 - protein, 9 aa, synthetic construct
PSQGVARLH

SEQ ID NO: 41611 - protein, 9 aa, synthetic construct
PSQGVIHLF

SEQ ID NO: 41612 - protein, 9 aa, synthetic construct
PSQGVIHVY

SEQ ID NO: 41613 - protein, 9 aa, synthetic construct
PSQGVIRLK

SEQ ID NO: 41614 - protein, 9 aa, synthetic construct
PSQGVGRVK

SEQ ID NO: 41615 - protein, 9 aa, synthetic construct
PSQGVGKLK

SEQ ID NO: 41616 - protein, 9 aa, synthetic construct
PSQGGARVF

SEQ ID NO: 41617 - protein, 9 aa, synthetic construct
PSQGGAKVH

SEQ ID NO: 41618 - protein, 9 aa, synthetic construct
PSQGGIRLY

SEQ ID NO: 41619 - protein, 9 aa, synthetic construct
PSQGGIRLR

SEQ ID NO: 41620 - protein, 9 aa, synthetic construct
PSQGGIRVY

SEQ ID NO: 41621 - protein, 9 aa, synthetic construct
PSQGGIRVH

SEQ ID NO: 41622 - protein, 9 aa, synthetic construct
PSQGGIKVF

SEQ ID NO: 41623 - protein, 9 aa, synthetic construct
PSQGGGRLY

SEQ ID NO: 41624 - protein, 9 aa, synthetic construct
PSQGGGRVR

SEQ ID NO: 41625 - protein, 9 aa, synthetic construct
PSQGGGRVH

SEQ ID NO: 41626 - protein, 9 aa, synthetic construct
PSQGGGRVK

SEQ ID NO: 41627 - protein, 9 aa, synthetic construct
PSQAAVRVK

SEQ ID NO: 41628 - protein, 9 aa, synthetic construct
PLNGAIKLK

SEQ ID NO: 41629 - protein, 9 aa, synthetic construct
PSQATLRLF

SEQ ID NO: 41630 - protein, 9 aa, synthetic construct
PSQATARVH

SEQ ID NO: 41631 - protein, 9 aa, synthetic construct
PSQATIKLR

SEQ ID NO: 41632 - protein, 9 aa, synthetic construct
PSQATIKVY

SEQ ID NO: 41633 - protein, 9 aa, synthetic construct
PLNASIRVF

SEQ ID NO: 41634 - protein, 9 aa, synthetic construct
PSQAVVKLH

SEQ ID NO: 41635 - protein, 9 aa, synthetic construct
PSQAVLHLF

SEQ ID NO: 41636 - protein, 9 aa, synthetic construct
PLNGAIKVK

SEQ ID NO: 41637 - protein, 9 aa, synthetic construct
PSQAVGHVR

SEQ ID NO: 41638 - protein, 9 aa, synthetic construct
PSQAVGKLR

SEQ ID NO: 41639 - protein, 9 aa, synthetic construct
PSQAGVHLY

SEQ ID NO: 41640 - protein, 9 aa, synthetic construct
PLNASGKLK

SEQ ID NO: 41641 - protein, 9 aa, synthetic construct
PLNASGKVR

SEQ ID NO: 41642 - protein, 9 aa, synthetic construct
PSQAGGRVY

SEQ ID NO: 41643 - protein, 9 aa, synthetic construct
PLNAVVRVR

SEQ ID NO: 41644 - protein, 9 aa, synthetic construct
PLNAVVRVK

SEQ ID NO: 41645 - protein, 9 aa, synthetic construct
PLNAVVKLK

SEQ ID NO: 41646 - protein, 9 aa, synthetic construct
PSPGTIRVR

SEQ ID NO: 41647 - protein, 9 aa, synthetic construct
PSPGTIRVK

SEQ ID NO: 41648 - protein, 9 aa, synthetic construct
PSPGTIKVK

SEQ ID NO: 41649 - protein, 9 aa, synthetic construct
PSPGTGKVR

SEQ ID NO: 41650 - protein, 9 aa, synthetic construct
PSPGSVRLY

SEQ ID NO: 41651 - protein, 9 aa, synthetic construct
PSPGSLRVH

SEQ ID NO: 41652 - protein, 9 aa, synthetic construct
PLNAVLHVY

SEQ ID NO: 41653 - protein, 9 aa, synthetic construct
PSPGSARLR

SEQ ID NO: 41654 - protein, 9 aa, synthetic construct
PSPGSIKLR

SEQ ID NO: 41655 - protein, 9 aa, synthetic construct
PSPGSGRLR

SEQ ID NO: 41656 - protein, 9 aa, synthetic construct
PLNAVLRVY

SEQ ID NO: 41657 - protein, 9 aa, synthetic construct
PSPGVVHLF

SEQ ID NO: 41658 - protein, 9 aa, synthetic construct
PSPGVVRLY

SEQ ID NO: 41659 - protein, 9 aa, synthetic construct
PSPGVVRLR

SEQ ID NO: 41660 - protein, 9 aa, synthetic construct
PSPGVVKVR

SEQ ID NO: 41661 - protein, 9 aa, synthetic construct
PLNAVLRVF

SEQ ID NO: 41662 - protein, 9 aa, synthetic construct
PLNAVLKLY

SEQ ID NO: 41663 - protein, 9 aa, synthetic construct
PSPGVARLR

SEQ ID NO: 41664 - protein, 9 aa, synthetic construct
PLNAVLKLK

SEQ ID NO: 41665 - protein, 9 aa, synthetic construct
PSPGVAKLR

SEQ ID NO: 41666 - protein, 9 aa, synthetic construct
PSPGVAKVY

SEQ ID NO: 41667 - protein, 9 aa, synthetic construct
PSPGVAKVK

SEQ ID NO: 41668 - protein, 9 aa, synthetic construct
PSPGVIRVR

SEQ ID NO: 41669 - protein, 9 aa, synthetic construct
PSPGVIRVK

SEQ ID NO: 41670 - protein, 9 aa, synthetic construct
PLNAVLKVR

SEQ ID NO: 41671 - protein, 9 aa, synthetic construct
PSPGVIKLF

SEQ ID NO: 41672 - protein, 9 aa, synthetic construct
PSPGVGHVF

SEQ ID NO: 41673 - protein, 9 aa, synthetic construct
PLNAVLKVK

SEQ ID NO: 41674 - protein, 9 aa, synthetic construct
PSPGVGRLH

SEQ ID NO: 41675 - protein, 9 aa, synthetic construct
PSPGGVRVH

SEQ ID NO: 41676 - protein, 9 aa, synthetic construct
PSPGGLKVR

SEQ ID NO: 41677 - protein, 9 aa, synthetic construct
PSPGGIRVK

SEQ ID NO: 41678 - protein, 9 aa, synthetic construct
PSPGGIKVR

SEQ ID NO: 41679 - protein, 9 aa, synthetic construct
PSPGGIKVK

SEQ ID NO: 41680 - protein, 9 aa, synthetic construct
PSPGGGKLK

SEQ ID NO: 41681 - protein, 9 aa, synthetic construct
PSPGGGKVR

SEQ ID NO: 41682 - protein, 9 aa, synthetic construct
PSPAAVRVF

SEQ ID NO: 41683 - protein, 9 aa, synthetic construct
PSPAALKLF

SEQ ID NO: 41684 - protein, 9 aa, synthetic construct
PSPAAIKLR

SEQ ID NO: 41685 - protein, 9 aa, synthetic construct
PSPAAGRLK

SEQ ID NO: 41686 - protein, 9 aa, synthetic construct
PSPATVKVK

SEQ ID NO: 41687 - protein, 9 aa, synthetic construct
PLNAVIHLK

SEQ ID NO: 41688 - protein, 9 aa, synthetic construct
PSPATLHLR

SEQ ID NO: 41689 - protein, 9 aa, synthetic construct
PSPATLRLF

SEQ ID NO: 41690 - protein, 9 aa, synthetic construct
PSPATLKVK

SEQ ID NO: 41691 - protein, 9 aa, synthetic construct
PLNAVIRLK

SEQ ID NO: 41692 - protein, 9 aa, synthetic construct
PSPATGRVK

SEQ ID NO: 41693 - protein, 9 aa, synthetic construct
PLNAVIRLF

SEQ ID NO: 41694 - protein, 9 aa, synthetic construct
PSPASVHVF

SEQ ID NO: 41695 - protein, 9 aa, synthetic construct
PSPASVRVR

SEQ ID NO: 41696 - protein, 9 aa, synthetic construct
PSPASVRVF

SEQ ID NO: 41697 - protein, 9 aa, synthetic construct
PSPASVKLR

SEQ ID NO: 41698 - protein, 9 aa, synthetic construct
PSPASVKLH

SEQ ID NO: 41699 - protein, 9 aa, synthetic construct
PSPASVKLK

SEQ ID NO: 41700 - protein, 9 aa, synthetic construct
PSPASVKVH

SEQ ID NO: 41701 - protein, 9 aa, synthetic construct
PSPASIHVF

SEQ ID NO: 41702 - protein, 9 aa, synthetic construct
PSPASIRVR

SEQ ID NO: 41703 - protein, 9 aa, synthetic construct
PSPASIKVK

SEQ ID NO: 41704 - protein, 9 aa, synthetic construct
PSPASGRVY

SEQ ID NO: 41705 - protein, 9 aa, synthetic construct
PSPASGKVH

SEQ ID NO: 41706 - protein, 9 aa, synthetic construct
PSPAVLRLR

SEQ ID NO: 41707 - protein, 9 aa, synthetic construct
PSPAVLRVY

SEQ ID NO: 41708 - protein, 9 aa, synthetic construct
PSPAVARLY

SEQ ID NO: 41709 - protein, 9 aa, synthetic construct
PSPAVARLF

SEQ ID NO: 41710 - protein, 9 aa, synthetic construct
PSPAVAKVY

SEQ ID NO: 41711 - protein, 9 aa, synthetic construct
PSPAVIHLY

SEQ ID NO: 41712 - protein, 9 aa, synthetic construct
PSPAVIRVY

SEQ ID NO: 41713 - protein, 9 aa, synthetic construct
PSPAVIRVF

SEQ ID NO: 41714 - protein, 9 aa, synthetic construct
PSPAVIKLK

SEQ ID NO: 41715 - protein, 9 aa, synthetic construct
PSPAVGRLH

SEQ ID NO: 41716 - protein, 9 aa, synthetic construct
PLNAVGRVR

SEQ ID NO: 41717 - protein, 9 aa, synthetic construct
PSPAGLHVK

SEQ ID NO: 41718 - protein, 9 aa, synthetic construct
PSPAGIRLR

SEQ ID NO: 41719 - protein, 9 aa, synthetic construct
PSPAGIKLR

SEQ ID NO: 41720 - protein, 9 aa, synthetic construct
PLNAVGKVK

SEQ ID NO: 41721 - protein, 9 aa, synthetic construct
PSPAGGRVK

SEQ ID NO: 41722 - protein, 9 aa, synthetic construct
PANGAVRLR

SEQ ID NO: 41723 - protein, 9 aa, synthetic construct
PANGALHVF

SEQ ID NO: 41724 - protein, 9 aa, synthetic construct
PANGALRLF

SEQ ID NO: 41725 - protein, 9 aa, synthetic construct
PANGALRVY

SEQ ID NO: 41726 - protein, 9 aa, synthetic construct
PANGAARLR

SEQ ID NO: 41727 - protein, 9 aa, synthetic construct
PANGAIKLR

SEQ ID NO: 41728 - protein, 9 aa, synthetic construct
PANGAGRLK

SEQ ID NO: 41729 - protein, 9 aa, synthetic construct
PANGAGKLR

SEQ ID NO: 41730 - protein, 9 aa, synthetic construct
PANGAGKLK

SEQ ID NO: 41731 - protein, 9 aa, synthetic construct
PANGAGKVR

SEQ ID NO: 41732 - protein, 9 aa, synthetic construct
PANGTVRLK

SEQ ID NO: 41733 - protein, 9 aa, synthetic construct
PANGTVRVR

SEQ ID NO: 41734 - protein, 9 aa, synthetic construct
PANGTVRVK

SEQ ID NO: 41735 - protein, 9 aa, synthetic construct
PANGTVKVR

SEQ ID NO: 41736 - protein, 9 aa, synthetic construct
PANGTLKLK

SEQ ID NO: 41737 - protein, 9 aa, synthetic construct
PANGTLKVK

SEQ ID NO: 41738 - protein, 9 aa, synthetic construct
PLNAGVKLR

SEQ ID NO: 41739 - protein, 9 aa, synthetic construct
PANGTARLK

SEQ ID NO: 41740 - protein, 9 aa, synthetic construct
PANGTGRLK

SEQ ID NO: 41741 - protein, 9 aa, synthetic construct
PANGTGRVK

SEQ ID NO: 41742 - protein, 9 aa, synthetic construct
PANGTGKLR

SEQ ID NO: 41743 - protein, 9 aa, synthetic construct
PANGTGKVK

SEQ ID NO: 41744 - protein, 9 aa, synthetic construct
PANGSLRVR

SEQ ID NO: 41745 - protein, 9 aa, synthetic construct
PANGSLKVR

SEQ ID NO: 41746 - protein, 9 aa, synthetic construct
PANGSIRVK

SEQ ID NO: 41747 - protein, 9 aa, synthetic construct
PANGSGKLK

SEQ ID NO: 41748 - protein, 9 aa, synthetic construct
PANGVVRLK

SEQ ID NO: 41749 - protein, 9 aa, synthetic construct
PANGVVKLK

SEQ ID NO: 41750 - protein, 9 aa, synthetic construct
PANGVLRLR

SEQ ID NO: 41751 - protein, 9 aa, synthetic construct
PANGVLRLK

SEQ ID NO: 41752 - protein, 9 aa, synthetic construct
PANGVLKLK

SEQ ID NO: 41753 - protein, 9 aa, synthetic construct
PANGVARVK

SEQ ID NO: 41754 - protein, 9 aa, synthetic construct
PLNAGLKVR

SEQ ID NO: 41755 - protein, 9 aa, synthetic construct
PANGVIKLR

SEQ ID NO: 41756 - protein, 9 aa, synthetic construct
PANGVIKVK

SEQ ID NO: 41757 - protein, 9 aa, synthetic construct
PANGGVKVR

SEQ ID NO: 41758 - protein, 9 aa, synthetic construct
PANGGLRVY

SEQ ID NO: 41759 - protein, 9 aa, synthetic construct
PANGGARVK

SEQ ID NO: 41760 - protein, 9 aa, synthetic construct
PANGGAKLK

SEQ ID NO: 41761 - protein, 9 aa, synthetic construct
PANGGGRVK

SEQ ID NO: 41762 - protein, 9 aa, synthetic construct
PANGGGKLR

SEQ ID NO: 41763 - protein, 9 aa, synthetic construct
PANAAVRLR

SEQ ID NO: 41764 - protein, 9 aa, synthetic construct
PANAAVRVR

SEQ ID NO: 41765 - protein, 9 aa, synthetic construct
PANAALRLK

SEQ ID NO: 41766 - protein, 9 aa, synthetic construct
PANAALRLF

SEQ ID NO: 41767 - protein, 9 aa, synthetic construct
PANAALRVY

SEQ ID NO: 41768 - protein, 9 aa, synthetic construct
PANAALRVK

SEQ ID NO: 41769 - protein, 9 aa, synthetic construct
PANAAIRLK

SEQ ID NO: 41770 - protein, 9 aa, synthetic construct
PANAAIRVR

SEQ ID NO: 41771 - protein, 9 aa, synthetic construct
PANAAIRVK

SEQ ID NO: 41772 - protein, 9 aa, synthetic construct
PLNAGAKVR

SEQ ID NO: 41773 - protein, 9 aa, synthetic construct
PANAAIKLR

SEQ ID NO: 41774 - protein, 9 aa, synthetic construct
PANAAIKVK

SEQ ID NO: 41775 - protein, 9 aa, synthetic construct
PANAAGKLR

SEQ ID NO: 41776 - protein, 9 aa, synthetic construct
PANAAGKLK

SEQ ID NO: 41777 - protein, 9 aa, synthetic construct
PANATVRLR

SEQ ID NO: 41778 - protein, 9 aa, synthetic construct
PANATVRLK

SEQ ID NO: 41779 - protein, 9 aa, synthetic construct
PANATVRVK

SEQ ID NO: 41780 - protein, 9 aa, synthetic construct
PANATVKLK

SEQ ID NO: 41781 - protein, 9 aa, synthetic construct
PANATLHVY

SEQ ID NO: 41782 - protein, 9 aa, synthetic construct
PANATLRLF

SEQ ID NO: 41783 - protein, 9 aa, synthetic construct
PANATLRVH

SEQ ID NO: 41784 - protein, 9 aa, synthetic construct
PANATLRVK

SEQ ID NO: 41785 - protein, 9 aa, synthetic construct
PANATLKLK

SEQ ID NO: 41786 - protein, 9 aa, synthetic construct
PANATLKVH

SEQ ID NO: 41787 - protein, 9 aa, synthetic construct
PANATLKVK

SEQ ID NO: 41788 - protein, 9 aa, synthetic construct
PANATARLK

SEQ ID NO: 41789 - protein, 9 aa, synthetic construct
PANATIRLR

SEQ ID NO: 41790 - protein, 9 aa, synthetic construct
PANATIRLH

SEQ ID NO: 41791 - protein, 9 aa, synthetic construct
PANATIRVK

SEQ ID NO: 41792 - protein, 9 aa, synthetic construct
PANATIKVR

SEQ ID NO: 41793 - protein, 9 aa, synthetic construct
PANATGRLK

SEQ ID NO: 41794 - protein, 9 aa, synthetic construct
PANATGKLK

SEQ ID NO: 41795 - protein, 9 aa, synthetic construct
PANATGKVK

SEQ ID NO: 41796 - protein, 9 aa, synthetic construct
PLNAGIRVY

SEQ ID NO: 41797 - protein, 9 aa, synthetic construct
PANASVKVK

SEQ ID NO: 41798 - protein, 9 aa, synthetic construct
PLNAGIRVK

SEQ ID NO: 41799 - protein, 9 aa, synthetic construct
PANASLRVY

SEQ ID NO: 41800 - protein, 9 aa, synthetic construct
PANASLRVH

SEQ ID NO: 41801 - protein, 9 aa, synthetic construct
PANASARVK

SEQ ID NO: 41802 - protein, 9 aa, synthetic construct
PANASAKLK

SEQ ID NO: 41803 - protein, 9 aa, synthetic construct
PANASAKVR

SEQ ID NO: 41804 - protein, 9 aa, synthetic construct
PANASIRVR

SEQ ID NO: 41805 - protein, 9 aa, synthetic construct
PANASIRVH

SEQ ID NO: 41806 - protein, 9 aa, synthetic construct
PANASIRVK

SEQ ID NO: 41807 - protein, 9 aa, synthetic construct
PANASIKVR

SEQ ID NO: 41808 - protein, 9 aa, synthetic construct
PANASIKVK

SEQ ID NO: 41809 - protein, 9 aa, synthetic construct
PLNAGIKVK

SEQ ID NO: 41810 - protein, 9 aa, synthetic construct
PANASGRLK

SEQ ID NO: 41811 - protein, 9 aa, synthetic construct
PANASGRVR

SEQ ID NO: 41812 - protein, 9 aa, synthetic construct
PANASGRVK

SEQ ID NO: 41813 - protein, 9 aa, synthetic construct
PANASGKLR

SEQ ID NO: 41814 - protein, 9 aa, synthetic construct
PANASGKLK

SEQ ID NO: 41815 - protein, 9 aa, synthetic construct
PANASGKVR

SEQ ID NO: 41816 - protein, 9 aa, synthetic construct
PANAVVRLK

SEQ ID NO: 41817 - protein, 9 aa, synthetic construct
PANAVVRVK

SEQ ID NO: 41818 - protein, 9 aa, synthetic construct
PANAVVKLK

SEQ ID NO: 41819 - protein, 9 aa, synthetic construct
PANAVLHLR

SEQ ID NO: 41820 - protein, 9 aa, synthetic construct
PANAVLHVK

SEQ ID NO: 41821 - protein, 9 aa, synthetic construct
PANAVLKVK

SEQ ID NO: 41822 - protein, 9 aa, synthetic construct
PANAVAHLY

SEQ ID NO: 41823 - protein, 9 aa, synthetic construct
PANAVAHLF

SEQ ID NO: 41824 - protein, 9 aa, synthetic construct
PANAVAHVY

SEQ ID NO: 41825 - protein, 9 aa, synthetic construct
PANAVARLF

SEQ ID NO: 41826 - protein, 9 aa, synthetic construct
PANAVARVY

SEQ ID NO: 41827 - protein, 9 aa, synthetic construct
PANAVARVR

SEQ ID NO: 41828 - protein, 9 aa, synthetic construct
PANAVARVH

SEQ ID NO: 41829 - protein, 9 aa, synthetic construct
PANAVAKVY

SEQ ID NO: 41830 - protein, 9 aa, synthetic construct
PANAVIRLK

SEQ ID NO: 41831 - protein, 9 aa, synthetic construct
PANAVIRVR

SEQ ID NO: 41832 - protein, 9 aa, synthetic construct
PLNAGGRLR

SEQ ID NO: 41833 - protein, 9 aa, synthetic construct
PANAVIKLR

SEQ ID NO: 41834 - protein, 9 aa, synthetic construct
PANAVIKVK

SEQ ID NO: 41835 - protein, 9 aa, synthetic construct
PANAVGRLR

SEQ ID NO: 41836 - protein, 9 aa, synthetic construct
PANAVGRLK

SEQ ID NO: 41837 - protein, 9 aa, synthetic construct
PANAVGRVR

SEQ ID NO: 41838 - protein, 9 aa, synthetic construct
PANAGVRLK

SEQ ID NO: 41839 - protein, 9 aa, synthetic construct
PANAGVKLK

SEQ ID NO: 41840 - protein, 9 aa, synthetic construct
PLNAGGRVK

SEQ ID NO: 41841 - protein, 9 aa, synthetic construct
PANAGLHLY

SEQ ID NO: 41842 - protein, 9 aa, synthetic construct
PLNAGGKLR

SEQ ID NO: 41843 - protein, 9 aa, synthetic construct
PANAGIKLR

SEQ ID NO: 41844 - protein, 9 aa, synthetic construct
PANAGGRVK

SEQ ID NO: 41845 - protein, 9 aa, synthetic construct
PANAGGKLR

SEQ ID NO: 41846 - protein, 9 aa, synthetic construct
PANAGGKLK

SEQ ID NO: 41847 - protein, 9 aa, synthetic construct
PANAGGKVR

SEQ ID NO: 41848 - protein, 9 aa, synthetic construct
PAQGAVKVR

SEQ ID NO: 41849 - protein, 9 aa, synthetic construct
PAQGAARVK

SEQ ID NO: 41850 - protein, 9 aa, synthetic construct
PAQGAAKVR

SEQ ID NO: 41851 - protein, 9 aa, synthetic construct
PAQGAIRLR

SEQ ID NO: 41852 - protein, 9 aa, synthetic construct
PAQGAIRLK

SEQ ID NO: 41853 - protein, 9 aa, synthetic construct
PAQGAIRVK

SEQ ID NO: 41854 - protein, 9 aa, synthetic construct
PAQGAGKLR

SEQ ID NO: 41855 - protein, 9 aa, synthetic construct
PAQGAGKLK

SEQ ID NO: 41856 - protein, 9 aa, synthetic construct
PAQGAGKVR

SEQ ID NO: 41857 - protein, 9 aa, synthetic construct
PAQGAGKVK

SEQ ID NO: 41858 - protein, 9 aa, synthetic construct
PLQGAVRVR

SEQ ID NO: 41859 - protein, 9 aa, synthetic construct
PAQGTVKLK

SEQ ID NO: 41860 - protein, 9 aa, synthetic construct
PLQGAVRVK

SEQ ID NO: 41861 - protein, 9 aa, synthetic construct
PAQGTLRLH

SEQ ID NO: 41862 - protein, 9 aa, synthetic construct
PAQGTLRLK

SEQ ID NO: 41863 - protein, 9 aa, synthetic construct
PAQGTLRVY

SEQ ID NO: 41864 - protein, 9 aa, synthetic construct
PAQGTLRVH

SEQ ID NO: 41865 - protein, 9 aa, synthetic construct
PAQGTLRVF

SEQ ID NO: 41866 - protein, 9 aa, synthetic construct
PAQGTLKLK

SEQ ID NO: 41867 - protein, 9 aa, synthetic construct
PAQGTARLR

SEQ ID NO: 41868 - protein, 9 aa, synthetic construct
PAQGTARVR

SEQ ID NO: 41869 - protein, 9 aa, synthetic construct
PAQGTIRLR

SEQ ID NO: 41870 - protein, 9 aa, synthetic construct
PAQGTIRVR

SEQ ID NO: 41871 - protein, 9 aa, synthetic construct
PLQGAVKVR

SEQ ID NO: 41872 - protein, 9 aa, synthetic construct
PAQGTIKLR

SEQ ID NO: 41873 - protein, 9 aa, synthetic construct
PAQGTIKLK

SEQ ID NO: 41874 - protein, 9 aa, synthetic construct
PAQGTIKVR

SEQ ID NO: 41875 - protein, 9 aa, synthetic construct
PAQGTGKLR

SEQ ID NO: 41876 - protein, 9 aa, synthetic construct
PAQGTGKLK

SEQ ID NO: 41877 - protein, 9 aa, synthetic construct
PAQGTGKVR

SEQ ID NO: 41878 - protein, 9 aa, synthetic construct
PAQGTGKVK

SEQ ID NO: 41879 - protein, 9 aa, synthetic construct
PAQGSVRVK

SEQ ID NO: 41880 - protein, 9 aa, synthetic construct
PAQGSLRLR

SEQ ID NO: 41881 - protein, 9 aa, synthetic construct
PAQGSLRLH

SEQ ID NO: 41882 - protein, 9 aa, synthetic construct
PAQGSLKLR

SEQ ID NO: 41883 - protein, 9 aa, synthetic construct
PAQGSLKLK

SEQ ID NO: 41884 - protein, 9 aa, synthetic construct
PAQGSLKVR

SEQ ID NO: 41885 - protein, 9 aa, synthetic construct
PAQGSLKVK

SEQ ID NO: 41886 - protein, 9 aa, synthetic construct
PAQGSARVR

SEQ ID NO: 41887 - protein, 9 aa, synthetic construct
PAQGSAKVK

SEQ ID NO: 41888 - protein, 9 aa, synthetic construct
PAQGSIRLR

SEQ ID NO: 41889 - protein, 9 aa, synthetic construct
PAQGSIRLK

SEQ ID NO: 41890 - protein, 9 aa, synthetic construct
PAQGSIKLK

SEQ ID NO: 41891 - protein, 9 aa, synthetic construct
PAQGSGRLH

SEQ ID NO: 41892 - protein, 9 aa, synthetic construct
PAQGSGRVR

SEQ ID NO: 41893 - protein, 9 aa, synthetic construct
PAQGSGKVK

SEQ ID NO: 41894 - protein, 9 aa, synthetic construct
PLQGALRVY

SEQ ID NO: 41895 - protein, 9 aa, synthetic construct
PAQGVVRLR

SEQ ID NO: 41896 - protein, 9 aa, synthetic construct
PAQGVVRVR

SEQ ID NO: 41897 - protein, 9 aa, synthetic construct
PAQGVVKVK

SEQ ID NO: 41898 - protein, 9 aa, synthetic construct
PAQGVLKLK

SEQ ID NO: 41899 - protein, 9 aa, synthetic construct
PAQGVLKVR

SEQ ID NO: 41900 - protein, 9 aa, synthetic construct
PAQGVLKVF

SEQ ID NO: 41901 - protein, 9 aa, synthetic construct
PAQGVARLH

SEQ ID NO: 41902 - protein, 9 aa, synthetic construct
PAQGVARLK

SEQ ID NO: 41903 - protein, 9 aa, synthetic construct
PAQGVAKLR

SEQ ID NO: 41904 - protein, 9 aa, synthetic construct
PAQGVAKVR

SEQ ID NO: 41905 - protein, 9 aa, synthetic construct
PAQGVIKLR

SEQ ID NO: 41906 - protein, 9 aa, synthetic construct
PAQGVIKVR

SEQ ID NO: 41907 - protein, 9 aa, synthetic construct
PLQGALKVK

SEQ ID NO: 41908 - protein, 9 aa, synthetic construct
PAQGVGKLK

SEQ ID NO: 41909 - protein, 9 aa, synthetic construct
PAQGVGKVK

SEQ ID NO: 41910 - protein, 9 aa, synthetic construct
PAQGGVKLK

SEQ ID NO: 41911 - protein, 9 aa, synthetic construct
PAQGGLHVF

SEQ ID NO: 41912 - protein, 9 aa, synthetic construct
PAQGGLKVR

SEQ ID NO: 41913 - protein, 9 aa, synthetic construct
PAQGGARLH

SEQ ID NO: 41914 - protein, 9 aa, synthetic construct
PAQGGARLK

SEQ ID NO: 41915 - protein, 9 aa, synthetic construct
PAQGGARVK

SEQ ID NO: 41916 - protein, 9 aa, synthetic construct
PAQGGAKVK

SEQ ID NO: 41917 - protein, 9 aa, synthetic construct
PAQGGIKLK

SEQ ID NO: 41918 - protein, 9 aa, synthetic construct
PAQGGIKVK

SEQ ID NO: 41919 - protein, 9 aa, synthetic construct
PAQGGGKLR

SEQ ID NO: 41920 - protein, 9 aa, synthetic construct
PAQGGGKVR

SEQ ID NO: 41921 - protein, 9 aa, synthetic construct
PAQAALRLY

SEQ ID NO: 41922 - protein, 9 aa, synthetic construct
PAQAALKLK

SEQ ID NO: 41923 - protein, 9 aa, synthetic construct
PAQAALKVR

SEQ ID NO: 41924 - protein, 9 aa, synthetic construct
PAQAAIRLR

SEQ ID NO: 41925 - protein, 9 aa, synthetic construct
PAQAAGKVR

SEQ ID NO: 41926 - protein, 9 aa, synthetic construct
PAQATVKLK

SEQ ID NO: 41927 - protein, 9 aa, synthetic construct
PAQATVKVK

SEQ ID NO: 41928 - protein, 9 aa, synthetic construct
PAQATLRLK

SEQ ID NO: 41929 - protein, 9 aa, synthetic construct
PAQATLRVR

SEQ ID NO: 41930 - protein, 9 aa, synthetic construct
PAQATLRVK

SEQ ID NO: 41931 - protein, 9 aa, synthetic construct
PAQATLKVR

SEQ ID NO: 41932 - protein, 9 aa, synthetic construct
PAQATARLR

SEQ ID NO: 41933 - protein, 9 aa, synthetic construct
PAQATAKLK

SEQ ID NO: 41934 - protein, 9 aa, synthetic construct
PAQATIRVR

SEQ ID NO: 41935 - protein, 9 aa, synthetic construct
PAQATIRVK

SEQ ID NO: 41936 - protein, 9 aa, synthetic construct
PAQATIKVR

SEQ ID NO: 41937 - protein, 9 aa, synthetic construct
PAQATGKLK

SEQ ID NO: 41938 - protein, 9 aa, synthetic construct
PAQASVRVR

SEQ ID NO: 41939 - protein, 9 aa, synthetic construct
PAQASVRVK

SEQ ID NO: 41940 - protein, 9 aa, synthetic construct
PAQASVKLR

SEQ ID NO: 41941 - protein, 9 aa, synthetic construct
PAQASVKVR

SEQ ID NO: 41942 - protein, 9 aa, synthetic construct
PLQGAIRVK

SEQ ID NO: 41943 - protein, 9 aa, synthetic construct
PAQASLRVR

SEQ ID NO: 41944 - protein, 9 aa, synthetic construct
PAQASLKVR

SEQ ID NO: 41945 - protein, 9 aa, synthetic construct
PAQASARLH

SEQ ID NO: 41946 - protein, 9 aa, synthetic construct
PAQASARVK

SEQ ID NO: 41947 - protein, 9 aa, synthetic construct
PAQASAKVK

SEQ ID NO: 41948 - protein, 9 aa, synthetic construct
PAQASIKVK

SEQ ID NO: 41949 - protein, 9 aa, synthetic construct
PAQAVLHVR

SEQ ID NO: 41950 - protein, 9 aa, synthetic construct
PAQAVLKVR

SEQ ID NO: 41951 - protein, 9 aa, synthetic construct
PAQAVLKVK

SEQ ID NO: 41952 - protein, 9 aa, synthetic construct
PAQAVARLY

SEQ ID NO: 41953 - protein, 9 aa, synthetic construct
PAQAVARLK

SEQ ID NO: 41954 - protein, 9 aa, synthetic construct
PAQAVARLF

SEQ ID NO: 41955 - protein, 9 aa, synthetic construct
PAQAVAKLK

SEQ ID NO: 41956 - protein, 9 aa, synthetic construct
PAQAVIRVR

SEQ ID NO: 41957 - protein, 9 aa, synthetic construct
PAQAVIKLK

SEQ ID NO: 41958 - protein, 9 aa, synthetic construct
PLQGAGRLK

SEQ ID NO: 41959 - protein, 9 aa, synthetic construct
PAQAVGRLR

SEQ ID NO: 41960 - protein, 9 aa, synthetic construct
PAQAVGRVR

SEQ ID NO: 41961 - protein, 9 aa, synthetic construct
PAQAVGKVR

SEQ ID NO: 41962 - protein, 9 aa, synthetic construct
PAQAGLKLH

SEQ ID NO: 41963 - protein, 9 aa, synthetic construct
PAQAGARLR

SEQ ID NO: 41964 - protein, 9 aa, synthetic construct
PAQAGARLH

SEQ ID NO: 41965 - protein, 9 aa, synthetic construct
PAQAGARVY

SEQ ID NO: 41966 - protein, 9 aa, synthetic construct
PAQAGARVK

SEQ ID NO: 41967 - protein, 9 aa, synthetic construct
PLQGAGKLK

SEQ ID NO: 41968 - protein, 9 aa, synthetic construct
PAQAGAKVK

SEQ ID NO: 41969 - protein, 9 aa, synthetic construct
PAQAGIRLK

SEQ ID NO: 41970 - protein, 9 aa, synthetic construct
PLQGAGKVR

SEQ ID NO: 41971 - protein, 9 aa, synthetic construct
PAQAGIKLR

SEQ ID NO: 41972 - protein, 9 aa, synthetic construct
PLQGAGKVK

SEQ ID NO: 41973 - protein, 9 aa, synthetic construct
PAQAGGRVK

SEQ ID NO: 41974 - protein, 9 aa, synthetic construct
PAQAGGKVR

SEQ ID NO: 41975 - protein, 9 aa, synthetic construct
PAPGAVRVR

SEQ ID NO: 41976 - protein, 9 aa, synthetic construct
PAPGAVRVK

SEQ ID NO: 41977 - protein, 9 aa, synthetic construct
PAPGAVKVR

SEQ ID NO: 41978 - protein, 9 aa, synthetic construct
PAPGALRLH

SEQ ID NO: 41979 - protein, 9 aa, synthetic construct
PAPGALRLK

SEQ ID NO: 41980 - protein, 9 aa, synthetic construct
PAPGALRLF

SEQ ID NO: 41981 - protein, 9 aa, synthetic construct
PAPGALKVR

SEQ ID NO: 41982 - protein, 9 aa, synthetic construct
PAPGAARVK

SEQ ID NO: 41983 - protein, 9 aa, synthetic construct
PAPGAIRVR

SEQ ID NO: 41984 - protein, 9 aa, synthetic construct
PAPGAIRVK

SEQ ID NO: 41985 - protein, 9 aa, synthetic construct
PLQGTVRLR

SEQ ID NO: 41986 - protein, 9 aa, synthetic construct
PAPGAIKVK

SEQ ID NO: 41987 - protein, 9 aa, synthetic construct
PLQGTVRLK

SEQ ID NO: 41988 - protein, 9 aa, synthetic construct
PAPGAGRLR

SEQ ID NO: 41989 - protein, 9 aa, synthetic construct
PAPGAGRLK

SEQ ID NO: 41990 - protein, 9 aa, synthetic construct
PAPGAGKLR

SEQ ID NO: 41991 - protein, 9 aa, synthetic construct
PAPGAGKLK

SEQ ID NO: 41992 - protein, 9 aa, synthetic construct
PAPGAGKVR

SEQ ID NO: 41993 - protein, 9 aa, synthetic construct
PLQGTVRVR

SEQ ID NO: 41994 - protein, 9 aa, synthetic construct
PAPGTVRVR

SEQ ID NO: 41995 - protein, 9 aa, synthetic construct
PAPGTVRVK

SEQ ID NO: 41996 - protein, 9 aa, synthetic construct
PAPGTVKLR

SEQ ID NO: 41997 - protein, 9 aa, synthetic construct
PAPGTLHLR

SEQ ID NO: 41998 - protein, 9 aa, synthetic construct
PAPGTLHLF

SEQ ID NO: 41999 - protein, 9 aa, synthetic construct
PAPGTLRVF

SEQ ID NO: 42000 - protein, 9 aa, synthetic construct
PAPGTLKVR

SEQ ID NO: 42001 - protein, 9 aa, synthetic construct
PAPGTLKVK

SEQ ID NO: 42002 - protein, 9 aa, synthetic construct
PAPGTAKLK

SEQ ID NO: 42003 - protein, 9 aa, synthetic construct
PAPGTIRVK

SEQ ID NO: 42004 - protein, 9 aa, synthetic construct
PAPGTGKLR

SEQ ID NO: 42005 - protein, 9 aa, synthetic construct
PAPGTGKLK

SEQ ID NO: 42006 - protein, 9 aa, synthetic construct
PLNGTVRVK

SEQ ID NO: 42007 - protein, 9 aa, synthetic construct
PAPGSVRLR

SEQ ID NO: 42008 - protein, 9 aa, synthetic construct
PAPGSVRVK

SEQ ID NO: 42009 - protein, 9 aa, synthetic construct
PAPGSLRLY

SEQ ID NO: 42010 - protein, 9 aa, synthetic construct
PAPGSAKVK

SEQ ID NO: 42011 - protein, 9 aa, synthetic construct
PAPGSGKVR

SEQ ID NO: 42012 - protein, 9 aa, synthetic construct
PAPGVVRLK

SEQ ID NO: 42013 - protein, 9 aa, synthetic construct
PAPGVVRVK

SEQ ID NO: 42014 - protein, 9 aa, synthetic construct
PLQGTLRVK

SEQ ID NO: 42015 - protein, 9 aa, synthetic construct
PLQGTLRVF

SEQ ID NO: 42016 - protein, 9 aa, synthetic construct
PAPGVLRVF

SEQ ID NO: 42017 - protein, 9 aa, synthetic construct
PAPGVLKLK

SEQ ID NO: 42018 - protein, 9 aa, synthetic construct
PAPGVLKVR

SEQ ID NO: 42019 - protein, 9 aa, synthetic construct
PAPGVAKLK

SEQ ID NO: 42020 - protein, 9 aa, synthetic construct
PAPGVIHLY

SEQ ID NO: 42021 - protein, 9 aa, synthetic construct
PAPGVGRLR

SEQ ID NO: 42022 - protein, 9 aa, synthetic construct
PLQGTLKVF

SEQ ID NO: 42023 - protein, 9 aa, synthetic construct
PAPGVGKLK

SEQ ID NO: 42024 - protein, 9 aa, synthetic construct
PAPGGVRVR

SEQ ID NO: 42025 - protein, 9 aa, synthetic construct
PAPGGVRVK

SEQ ID NO: 42026 - protein, 9 aa, synthetic construct
PAPGGVKLR

SEQ ID NO: 42027 - protein, 9 aa, synthetic construct
PAPGGIRVK

SEQ ID NO: 42028 - protein, 9 aa, synthetic construct
PAPGGGKLR

SEQ ID NO: 42029 - protein, 9 aa, synthetic construct
PAPGGGKLK

SEQ ID NO: 42030 - protein, 9 aa, synthetic construct
PAPGGGKVR

SEQ ID NO: 42031 - protein, 9 aa, synthetic construct
PAPAAVRLK

SEQ ID NO: 42032 - protein, 9 aa, synthetic construct
PAPAAVRVR

SEQ ID NO: 42033 - protein, 9 aa, synthetic construct
PAPAAVKVR

SEQ ID NO: 42034 - protein, 9 aa, synthetic construct
PAPAAVKVK

SEQ ID NO: 42035 - protein, 9 aa, synthetic construct
PAPAALRVY

SEQ ID NO: 42036 - protein, 9 aa, synthetic construct
PAPAALRVK

SEQ ID NO: 42037 - protein, 9 aa, synthetic construct
PAPAALKLK

SEQ ID NO: 42038 - protein, 9 aa, synthetic construct
PAPAALKVK

SEQ ID NO: 42039 - protein, 9 aa, synthetic construct
PAPAAAKLK

SEQ ID NO: 42040 - protein, 9 aa, synthetic construct
PAPAAIRVR

SEQ ID NO: 42041 - protein, 9 aa, synthetic construct
PLQGTAKVK

SEQ ID NO: 42042 - protein, 9 aa, synthetic construct
PAPATVRVK

SEQ ID NO: 42043 - protein, 9 aa, synthetic construct
PAPATLKVR

SEQ ID NO: 42044 - protein, 9 aa, synthetic construct
PAPATARVK

SEQ ID NO: 42045 - protein, 9 aa, synthetic construct
PAPATAKLK

SEQ ID NO: 42046 - protein, 9 aa, synthetic construct
PAPATAKVR

SEQ ID NO: 42047 - protein, 9 aa, synthetic construct
PAPATIRLK

SEQ ID NO: 42048 - protein, 9 aa, synthetic construct
PAPATIRVR

SEQ ID NO: 42049 - protein, 9 aa, synthetic construct
PAPATIKLF

SEQ ID NO: 42050 - protein, 9 aa, synthetic construct
PAPATIKVR

SEQ ID NO: 42051 - protein, 9 aa, synthetic construct
PAPATGRLR

SEQ ID NO: 42052 - protein, 9 aa, synthetic construct
PAPATGKVR

SEQ ID NO: 42053 - protein, 9 aa, synthetic construct
PAPATGKVK

SEQ ID NO: 42054 - protein, 9 aa, synthetic construct
PAPASVRLR

SEQ ID NO: 42055 - protein, 9 aa, synthetic construct
PAPASVRLH

SEQ ID NO: 42056 - protein, 9 aa, synthetic construct
PAPASVRLK

SEQ ID NO: 42057 - protein, 9 aa, synthetic construct
PAPASVRVH

SEQ ID NO: 42058 - protein, 9 aa, synthetic construct
PAPASVKLR

SEQ ID NO: 42059 - protein, 9 aa, synthetic construct
PAPASVKVR

SEQ ID NO: 42060 - protein, 9 aa, synthetic construct
PAPASVKVK

SEQ ID NO: 42061 - protein, 9 aa, synthetic construct
PLQGTIRVK

SEQ ID NO: 42062 - protein, 9 aa, synthetic construct
PAPASLRLR

SEQ ID NO: 42063 - protein, 9 aa, synthetic construct
PAPASLRVH

SEQ ID NO: 42064 - protein, 9 aa, synthetic construct
PAPASLKLR

SEQ ID NO: 42065 - protein, 9 aa, synthetic construct
PAPASLKVR

SEQ ID NO: 42066 - protein, 9 aa, synthetic construct
PAPASLKVK

SEQ ID NO: 42067 - protein, 9 aa, synthetic construct
PAPASLKVF

SEQ ID NO: 42068 - protein, 9 aa, synthetic construct
PAPASARVR

SEQ ID NO: 42069 - protein, 9 aa, synthetic construct
PAPASARVK

SEQ ID NO: 42070 - protein, 9 aa, synthetic construct
PLQGTIKLK

SEQ ID NO: 42071 - protein, 9 aa, synthetic construct
PAPASIHLR

SEQ ID NO: 42072 - protein, 9 aa, synthetic construct
PAPASIKVR

SEQ ID NO: 42073 - protein, 9 aa, synthetic construct
PAPASGKLR

SEQ ID NO: 42074 - protein, 9 aa, synthetic construct
PAPAVVRVR

SEQ ID NO: 42075 - protein, 9 aa, synthetic construct
PAPAVVRVK

SEQ ID NO: 42076 - protein, 9 aa, synthetic construct
PAPAVVKVR

SEQ ID NO: 42077 - protein, 9 aa, synthetic construct
PAPAVLRVH

SEQ ID NO: 42078 - protein, 9 aa, synthetic construct
PAPAVAHLY

SEQ ID NO: 42079 - protein, 9 aa, synthetic construct
PAPAVARLY

SEQ ID NO: 42080 - protein, 9 aa, synthetic construct
PLQGTGRLR

SEQ ID NO: 42081 - protein, 9 aa, synthetic construct
PAPAVIKVK

SEQ ID NO: 42082 - protein, 9 aa, synthetic construct
PLQGTGRLK

SEQ ID NO: 42083 - protein, 9 aa, synthetic construct
PAPAVGRLK

SEQ ID NO: 42084 - protein, 9 aa, synthetic construct
PAPAVGKLK

SEQ ID NO: 42085 - protein, 9 aa, synthetic construct
PAPAGVKLK

SEQ ID NO: 42086 - protein, 9 aa, synthetic construct
PAPAGLRVK

SEQ ID NO: 42087 - protein, 9 aa, synthetic construct
PLQGTGKLR

SEQ ID NO: 42088 - protein, 9 aa, synthetic construct
PAPAGIRVY

SEQ ID NO: 42089 - protein, 9 aa, synthetic construct
PLQGTGKVR

SEQ ID NO: 42090 - protein, 9 aa, synthetic construct
PLQGTGKVK

SEQ ID NO: 42091 - protein, 9 aa, synthetic construct
PAPAGGKLK

SEQ ID NO: 42092 - protein, 9 aa, synthetic construct
PAPAGGKVR

SEQ ID NO: 42093 - protein, 9 aa, synthetic construct
PVNGALHVF

SEQ ID NO: 42094 - protein, 9 aa, synthetic construct
PVNGALRLF

SEQ ID NO: 42095 - protein, 9 aa, synthetic construct
PVNGAARVK

SEQ ID NO: 42096 - protein, 9 aa, synthetic construct
PVNGAIRVK

SEQ ID NO: 42097 - protein, 9 aa, synthetic construct
PLQGSVRLH

SEQ ID NO: 42098 - protein, 9 aa, synthetic construct
PVNGTVRLR

SEQ ID NO: 42099 - protein, 9 aa, synthetic construct
PVNGTVRVK

SEQ ID NO: 42100 - protein, 9 aa, synthetic construct
PLQGSVRVH

SEQ ID NO: 42101 - protein, 9 aa, synthetic construct
PVNGTVKVR

SEQ ID NO: 42102 - protein, 9 aa, synthetic construct
PVNGTLRLR

SEQ ID NO: 42103 - protein, 9 aa, synthetic construct
PLQGSVKLH

SEQ ID NO: 42104 - protein, 9 aa, synthetic construct
PVNGTARLR

SEQ ID NO: 42105 - protein, 9 aa, synthetic construct
PVNGTAKLK

SEQ ID NO: 42106 - protein, 9 aa, synthetic construct
PVNGTAKVR

SEQ ID NO: 42107 - protein, 9 aa, synthetic construct
PVNGTIRLR

SEQ ID NO: 42108 - protein, 9 aa, synthetic construct
PVNGTIRLK

SEQ ID NO: 42109 - protein, 9 aa, synthetic construct
PVNGTIKVK

SEQ ID NO: 42110 - protein, 9 aa, synthetic construct
PVNGTGRLK

SEQ ID NO: 42111 - protein, 9 aa, synthetic construct
PVNGTGKLK

SEQ ID NO: 42112 - protein, 9 aa, synthetic construct
PVNGTGKVK

SEQ ID NO: 42113 - protein, 9 aa, synthetic construct
PVNGSVRLR

SEQ ID NO: 42114 - protein, 9 aa, synthetic construct
PVNGSVRLK

SEQ ID NO: 42115 - protein, 9 aa, synthetic construct
PVNGSLKVR

SEQ ID NO: 42116 - protein, 9 aa, synthetic construct
PVNGSIKLR

SEQ ID NO: 42117 - protein, 9 aa, synthetic construct
PVNGSGKLK

SEQ ID NO: 42118 - protein, 9 aa, synthetic construct
PVNGVVKLK

SEQ ID NO: 42119 - protein, 9 aa, synthetic construct
PVNGVLHLY

SEQ ID NO: 42120 - protein, 9 aa, synthetic construct
PVNGVLRLK

SEQ ID NO: 42121 - protein, 9 aa, synthetic construct
PVNGVLRVY

SEQ ID NO: 42122 - protein, 9 aa, synthetic construct
PVNGVLKLK

SEQ ID NO: 42123 - protein, 9 aa, synthetic construct
PVNGVLKVK

SEQ ID NO: 42124 - protein, 9 aa, synthetic construct
PVNGVIRVR

SEQ ID NO: 42125 - protein, 9 aa, synthetic construct
PVNGVIRVK

SEQ ID NO: 42126 - protein, 9 aa, synthetic construct
PVNGVGHLF

SEQ ID NO: 42127 - protein, 9 aa, synthetic construct
PVNGGVRLR

SEQ ID NO: 42128 - protein, 9 aa, synthetic construct
PVNGGVRVR

SEQ ID NO: 42129 - protein, 9 aa, synthetic construct
PVNGGLRLK

SEQ ID NO: 42130 - protein, 9 aa, synthetic construct
PVNGGLRVF

SEQ ID NO: 42131 - protein, 9 aa, synthetic construct
PVNGGLKLR

SEQ ID NO: 42132 - protein, 9 aa, synthetic construct
PVNGGLKLF

SEQ ID NO: 42133 - protein, 9 aa, synthetic construct
PVNGGLKVR

SEQ ID NO: 42134 - protein, 9 aa, synthetic construct
PVNGGARLK

SEQ ID NO: 42135 - protein, 9 aa, synthetic construct
PVNGGAKLK

SEQ ID NO: 42136 - protein, 9 aa, synthetic construct
PVNGGIRLR

SEQ ID NO: 42137 - protein, 9 aa, synthetic construct
PVNGGIRVK

SEQ ID NO: 42138 - protein, 9 aa, synthetic construct
PVNGGIKVK

SEQ ID NO: 42139 - protein, 9 aa, synthetic construct
PVNGGGKLK

SEQ ID NO: 42140 - protein, 9 aa, synthetic construct
PVNGGGKVR

SEQ ID NO: 42141 - protein, 9 aa, synthetic construct
PVNAAVRLR

SEQ ID NO: 42142 - protein, 9 aa, synthetic construct
PVNAAVRVR

SEQ ID NO: 42143 - protein, 9 aa, synthetic construct
PVNAALRLR

SEQ ID NO: 42144 - protein, 9 aa, synthetic construct
PVNAALRVR

SEQ ID NO: 42145 - protein, 9 aa, synthetic construct
PVNAALRVK

SEQ ID NO: 42146 - protein, 9 aa, synthetic construct
PVNAAAKLK

SEQ ID NO: 42147 - protein, 9 aa, synthetic construct
PVNATVRLR

SEQ ID NO: 42148 - protein, 9 aa, synthetic construct
PVNATVRLK

SEQ ID NO: 42149 - protein, 9 aa, synthetic construct
PVNATVRLF

SEQ ID NO: 42150 - protein, 9 aa, synthetic construct
PVNATVRVR

SEQ ID NO: 42151 - protein, 9 aa, synthetic construct
PVNATVRVK

SEQ ID NO: 42152 - protein, 9 aa, synthetic construct
PVNATVKVK

SEQ ID NO: 42153 - protein, 9 aa, synthetic construct
PVNATLHLR

SEQ ID NO: 42154 - protein, 9 aa, synthetic construct
PVNATLRLY

SEQ ID NO: 42155 - protein, 9 aa, synthetic construct
PVNATLRLF

SEQ ID NO: 42156 - protein, 9 aa, synthetic construct
PVNATLKLR

SEQ ID NO: 42157 - protein, 9 aa, synthetic construct
PVNATLKVF

SEQ ID NO: 42158 - protein, 9 aa, synthetic construct
PVNATIRVK

SEQ ID NO: 42159 - protein, 9 aa, synthetic construct
PLQGSIRLK

SEQ ID NO: 42160 - protein, 9 aa, synthetic construct
PVNATGKLK

SEQ ID NO: 42161 - protein, 9 aa, synthetic construct
PVNASVRLR

SEQ ID NO: 42162 - protein, 9 aa, synthetic construct
PVNASVRLK

SEQ ID NO: 42163 - protein, 9 aa, synthetic construct
PVNASVRVR

SEQ ID NO: 42164 - protein, 9 aa, synthetic construct
PVNASIRLR

SEQ ID NO: 42165 - protein, 9 aa, synthetic construct
PVNASIRVY

SEQ ID NO: 42166 - protein, 9 aa, synthetic construct
PVNASIRVK

SEQ ID NO: 42167 - protein, 9 aa, synthetic construct
PVNASIKLR

SEQ ID NO: 42168 - protein, 9 aa, synthetic construct
PVNASIKVK

SEQ ID NO: 42169 - protein, 9 aa, synthetic construct
PVNASGKLR

SEQ ID NO: 42170 - protein, 9 aa, synthetic construct
PVNASGKLK

SEQ ID NO: 42171 - protein, 9 aa, synthetic construct
PLNGTLRLH

SEQ ID NO: 42172 - protein, 9 aa, synthetic construct
PVNAVVHLF

SEQ ID NO: 42173 - protein, 9 aa, synthetic construct
PVNAVVRVY

SEQ ID NO: 42174 - protein, 9 aa, synthetic construct
PVNAVVRVK

SEQ ID NO: 42175 - protein, 9 aa, synthetic construct
PVNAVVKLK

SEQ ID NO: 42176 - protein, 9 aa, synthetic construct
PVNAVLHVY

SEQ ID NO: 42177 - protein, 9 aa, synthetic construct
PVNAVLHVH

SEQ ID NO: 42178 - protein, 9 aa, synthetic construct
PVNAVLRLY

SEQ ID NO: 42179 - protein, 9 aa, synthetic construct
PVNAVAHLF

SEQ ID NO: 42180 - protein, 9 aa, synthetic construct
PVNAVAHVF

SEQ ID NO: 42181 - protein, 9 aa, synthetic construct
PVNAVIRLK

SEQ ID NO: 42182 - protein, 9 aa, synthetic construct
PVNAVIRVY

SEQ ID NO: 42183 - protein, 9 aa, synthetic construct
PVNAVIRVK

SEQ ID NO: 42184 - protein, 9 aa, synthetic construct
PVNAVIRVF

SEQ ID NO: 42185 - protein, 9 aa, synthetic construct
PLQGSGRLR

SEQ ID NO: 42186 - protein, 9 aa, synthetic construct
PVNAVIKLY

SEQ ID NO: 42187 - protein, 9 aa, synthetic construct
PVNAVIKLR

SEQ ID NO: 42188 - protein, 9 aa, synthetic construct
PVNAVIKVK

SEQ ID NO: 42189 - protein, 9 aa, synthetic construct
PVNAVGKVK

SEQ ID NO: 42190 - protein, 9 aa, synthetic construct
PVNAGVRLR

SEQ ID NO: 42191 - protein, 9 aa, synthetic construct
PLQGSGRVK

SEQ ID NO: 42192 - protein, 9 aa, synthetic construct
PVNAGLRLR

SEQ ID NO: 42193 - protein, 9 aa, synthetic construct
PVNAGLRLF

SEQ ID NO: 42194 - protein, 9 aa, synthetic construct
PLNGTLRLF

SEQ ID NO: 42195 - protein, 9 aa, synthetic construct
PVNAGLKLK

SEQ ID NO: 42196 - protein, 9 aa, synthetic construct
PLQGSGKLK

SEQ ID NO: 42197 - protein, 9 aa, synthetic construct
PVNAGAKVR

SEQ ID NO: 42198 - protein, 9 aa, synthetic construct
PVNAGIRVY

SEQ ID NO: 42199 - protein, 9 aa, synthetic construct
PLQGSGKVR

SEQ ID NO: 42200 - protein, 9 aa, synthetic construct
PVNAGGKLR

SEQ ID NO: 42201 - protein, 9 aa, synthetic construct
PVNAGGKLK

SEQ ID NO: 42202 - protein, 9 aa, synthetic construct
PVNAGGKVR

SEQ ID NO: 42203 - protein, 9 aa, synthetic construct
PVQGAVKLK

SEQ ID NO: 42204 - protein, 9 aa, synthetic construct
PVQGAVKVR

SEQ ID NO: 42205 - protein, 9 aa, synthetic construct
PVQGALRVF

SEQ ID NO: 42206 - protein, 9 aa, synthetic construct
PVQGAARLK

SEQ ID NO: 42207 - protein, 9 aa, synthetic construct
PVQGAARVK

SEQ ID NO: 42208 - protein, 9 aa, synthetic construct
PVQGAAKVR

SEQ ID NO: 42209 - protein, 9 aa, synthetic construct
PVQGAIRLK

SEQ ID NO: 42210 - protein, 9 aa, synthetic construct
PVQGAIRVK

SEQ ID NO: 42211 - protein, 9 aa, synthetic construct
PVQGAGRVR

SEQ ID NO: 42212 - protein, 9 aa, synthetic construct
PVQGAGKLK

SEQ ID NO: 42213 - protein, 9 aa, synthetic construct
PVQGAGKVR

SEQ ID NO: 42214 - protein, 9 aa, synthetic construct
PVQGAGKVK

SEQ ID NO: 42215 - protein, 9 aa, synthetic construct
PLQGVVRVY

SEQ ID NO: 42216 - protein, 9 aa, synthetic construct
PVQGTVRLR

SEQ ID NO: 42217 - protein, 9 aa, synthetic construct
PVQGTVKLR

SEQ ID NO: 42218 - protein, 9 aa, synthetic construct
PLQGVVRVK

SEQ ID NO: 42219 - protein, 9 aa, synthetic construct
PVQGTLKVK

SEQ ID NO: 42220 - protein, 9 aa, synthetic construct
PLQGVVKLR

SEQ ID NO: 42221 - protein, 9 aa, synthetic construct
PVQGTARLR

SEQ ID NO: 42222 - protein, 9 aa, synthetic construct
PVQGTARVR

SEQ ID NO: 42223 - protein, 9 aa, synthetic construct
PLQGVVKLK

SEQ ID NO: 42224 - protein, 9 aa, synthetic construct
PVQGTIRVR

SEQ ID NO: 42225 - protein, 9 aa, synthetic construct
PVQGTIKLR

SEQ ID NO: 42226 - protein, 9 aa, synthetic construct
PVQGTIKLK

SEQ ID NO: 42227 - protein, 9 aa, synthetic construct
PVQGTGRLK

SEQ ID NO: 42228 - protein, 9 aa, synthetic construct
PVQGTGKLK

SEQ ID NO: 42229 - protein, 9 aa, synthetic construct
PVQGTGKVR

SEQ ID NO: 42230 - protein, 9 aa, synthetic construct
PLNGTLRVK

SEQ ID NO: 42231 - protein, 9 aa, synthetic construct
PVQGSVRVK

SEQ ID NO: 42232 - protein, 9 aa, synthetic construct
PVQGSLRLY

SEQ ID NO: 42233 - protein, 9 aa, synthetic construct
PVQGSLRVF

SEQ ID NO: 42234 - protein, 9 aa, synthetic construct
PVQGSLKVR

SEQ ID NO: 42235 - protein, 9 aa, synthetic construct
PLQGVLHVR

SEQ ID NO: 42236 - protein, 9 aa, synthetic construct
PLNGTLRVF

SEQ ID NO: 42237 - protein, 9 aa, synthetic construct
PVQGSIRLR

SEQ ID NO: 42238 - protein, 9 aa, synthetic construct
PVQGSGKVR

SEQ ID NO: 42239 - protein, 9 aa, synthetic construct
PVQGVVRVY

SEQ ID NO: 42240 - protein, 9 aa, synthetic construct
PVQGVVKLR

SEQ ID NO: 42241 - protein, 9 aa, synthetic construct
PVQGVVKLK

SEQ ID NO: 42242 - protein, 9 aa, synthetic construct
PVQGVVKVK

SEQ ID NO: 42243 - protein, 9 aa, synthetic construct
PVQGVLHVR

SEQ ID NO: 42244 - protein, 9 aa, synthetic construct
PVQGVLRLR

SEQ ID NO: 42245 - protein, 9 aa, synthetic construct
PVQGVLRVR

SEQ ID NO: 42246 - protein, 9 aa, synthetic construct
PVQGVLKLR

SEQ ID NO: 42247 - protein, 9 aa, synthetic construct
PVQGVLKLF

SEQ ID NO: 42248 - protein, 9 aa, synthetic construct
PVQGVLKVR

SEQ ID NO: 42249 - protein, 9 aa, synthetic construct
PVQGVLKVK

SEQ ID NO: 42250 - protein, 9 aa, synthetic construct
PVQGVARLY

SEQ ID NO: 42251 - protein, 9 aa, synthetic construct
PVQGVARLH

SEQ ID NO: 42252 - protein, 9 aa, synthetic construct
PVQGVIRVR

SEQ ID NO: 42253 - protein, 9 aa, synthetic construct
PLQGVLKVR

SEQ ID NO: 42254 - protein, 9 aa, synthetic construct
PVQGVIKLR

SEQ ID NO: 42255 - protein, 9 aa, synthetic construct
PLQGVLKVK

SEQ ID NO: 42256 - protein, 9 aa, synthetic construct
PVQGVGKLK

SEQ ID NO: 42257 - protein, 9 aa, synthetic construct
PVQGVGKVR

SEQ ID NO: 42258 - protein, 9 aa, synthetic construct
PVQGVGKVK

SEQ ID NO: 42259 - protein, 9 aa, synthetic construct
PVQGGVRLR

SEQ ID NO: 42260 - protein, 9 aa, synthetic construct
PVQGGVRLK

SEQ ID NO: 42261 - protein, 9 aa, synthetic construct
PVQGGVKLK

SEQ ID NO: 42262 - protein, 9 aa, synthetic construct
PLQGVAHVR

SEQ ID NO: 42263 - protein, 9 aa, synthetic construct
PVQGGARVK

SEQ ID NO: 42264 - protein, 9 aa, synthetic construct
PLQGVARLY

SEQ ID NO: 42265 - protein, 9 aa, synthetic construct
PVQGGIRVF

SEQ ID NO: 42266 - protein, 9 aa, synthetic construct
PVQGGIKLK

SEQ ID NO: 42267 - protein, 9 aa, synthetic construct
PVQGGIKVK

SEQ ID NO: 42268 - protein, 9 aa, synthetic construct
PVQGGGHLR

SEQ ID NO: 42269 - protein, 9 aa, synthetic construct
PVQGGGHVH

SEQ ID NO: 42270 - protein, 9 aa, synthetic construct
PVQGGGRLH

SEQ ID NO: 42271 - protein, 9 aa, synthetic construct
PVQGGGRVR

SEQ ID NO: 42272 - protein, 9 aa, synthetic construct
PLQGVARLF

SEQ ID NO: 42273 - protein, 9 aa, synthetic construct
PVQGGGKLR

SEQ ID NO: 42274 - protein, 9 aa, synthetic construct
PVQGGGKVR

SEQ ID NO: 42275 - protein, 9 aa, synthetic construct
PVQGGGKVK

SEQ ID NO: 42276 - protein, 9 aa, synthetic construct
PLQGVARVY

SEQ ID NO: 42277 - protein, 9 aa, synthetic construct
PVQAAVRLR

SEQ ID NO: 42278 - protein, 9 aa, synthetic construct
PVQAALHVR

SEQ ID NO: 42279 - protein, 9 aa, synthetic construct
PLQGVAKLY

SEQ ID NO: 42280 - protein, 9 aa, synthetic construct
PVQAALKVR

SEQ ID NO: 42281 - protein, 9 aa, synthetic construct
PVQAAAKLK

SEQ ID NO: 42282 - protein, 9 aa, synthetic construct
PVQAAAKVR

SEQ ID NO: 42283 - protein, 9 aa, synthetic construct
PLQGVAKLF

SEQ ID NO: 42284 - protein, 9 aa, synthetic construct
PLQGVAKVY

SEQ ID NO: 42285 - protein, 9 aa, synthetic construct
PVQAAIKLR

SEQ ID NO: 42286 - protein, 9 aa, synthetic construct
PLQGVAKVK

SEQ ID NO: 42287 - protein, 9 aa, synthetic construct
PVQATLRLH

SEQ ID NO: 42288 - protein, 9 aa, synthetic construct
PVQATLRLK

SEQ ID NO: 42289 - protein, 9 aa, synthetic construct
PVQATLRVR

SEQ ID NO: 42290 - protein, 9 aa, synthetic construct
PVQATLKLR

SEQ ID NO: 42291 - protein, 9 aa, synthetic construct
PVQATLKLK

SEQ ID NO: 42292 - protein, 9 aa, synthetic construct
PVQATLKVR

SEQ ID NO: 42293 - protein, 9 aa, synthetic construct
PVQATLKVK

SEQ ID NO: 42294 - protein, 9 aa, synthetic construct
PVQATARLK

SEQ ID NO: 42295 - protein, 9 aa, synthetic construct
PVQATAKLK

SEQ ID NO: 42296 - protein, 9 aa, synthetic construct
PVQATAKVR

SEQ ID NO: 42297 - protein, 9 aa, synthetic construct
PVQATIRVR

SEQ ID NO: 42298 - protein, 9 aa, synthetic construct
PVQATIRVK

SEQ ID NO: 42299 - protein, 9 aa, synthetic construct
PVQATIKLR

SEQ ID NO: 42300 - protein, 9 aa, synthetic construct
PVQATIKVY

SEQ ID NO: 42301 - protein, 9 aa, synthetic construct
PVQATIKVK

SEQ ID NO: 42302 - protein, 9 aa, synthetic construct
PVQATGKVR

SEQ ID NO: 42303 - protein, 9 aa, synthetic construct
PVQATGKVK

SEQ ID NO: 42304 - protein, 9 aa, synthetic construct
PLQGVIRVY

SEQ ID NO: 42305 - protein, 9 aa, synthetic construct
PVQASVRVK

SEQ ID NO: 42306 - protein, 9 aa, synthetic construct
PLQGVIRVK

SEQ ID NO: 42307 - protein, 9 aa, synthetic construct
PVQASLKLR

SEQ ID NO: 42308 - protein, 9 aa, synthetic construct
PLQGVIKLR

SEQ ID NO: 42309 - protein, 9 aa, synthetic construct
PVQASGKLR

SEQ ID NO: 42310 - protein, 9 aa, synthetic construct
PVQAVVRLH

SEQ ID NO: 42311 - protein, 9 aa, synthetic construct
PVQAVVRVY

SEQ ID NO: 42312 - protein, 9 aa, synthetic construct
PVQAVVRVR

SEQ ID NO: 42313 - protein, 9 aa, synthetic construct
PVQAVVRVK

SEQ ID NO: 42314 - protein, 9 aa, synthetic construct
PVQAVVKLR

SEQ ID NO: 42315 - protein, 9 aa, synthetic construct
PVQAVVKLK

SEQ ID NO: 42316 - protein, 9 aa, synthetic construct
PVQAVVKVR

SEQ ID NO: 42317 - protein, 9 aa, synthetic construct
PVQAVLHLR

SEQ ID NO: 42318 - protein, 9 aa, synthetic construct
PVQAVLRVH

SEQ ID NO: 42319 - protein, 9 aa, synthetic construct
PVQAVLRVF

SEQ ID NO: 42320 - protein, 9 aa, synthetic construct
PVQAVLKLK

SEQ ID NO: 42321 - protein, 9 aa, synthetic construct
PVQAVLKVK

SEQ ID NO: 42322 - protein, 9 aa, synthetic construct
PVQAVARLF

SEQ ID NO: 42323 - protein, 9 aa, synthetic construct
PLQGVGRLY

SEQ ID NO: 42324 - protein, 9 aa, synthetic construct
PVQAVIRLY

SEQ ID NO: 42325 - protein, 9 aa, synthetic construct
PVQAVIRLF

SEQ ID NO: 42326 - protein, 9 aa, synthetic construct
PVQAVIRVY

SEQ ID NO: 42327 - protein, 9 aa, synthetic construct
PVQAVIKVR

SEQ ID NO: 42328 - protein, 9 aa, synthetic construct
PVQAVIKVK

SEQ ID NO: 42329 - protein, 9 aa, synthetic construct
PVQAVIKVF

SEQ ID NO: 42330 - protein, 9 aa, synthetic construct
PVQAVGHLY

SEQ ID NO: 42331 - protein, 9 aa, synthetic construct
PVQAVGHLF

SEQ ID NO: 42332 - protein, 9 aa, synthetic construct
PVQAVGRLR

SEQ ID NO: 42333 - protein, 9 aa, synthetic construct
PVQAVGRVR

SEQ ID NO: 42334 - protein, 9 aa, synthetic construct
PVQAVGKVR

SEQ ID NO: 42335 - protein, 9 aa, synthetic construct
PLQGVGRVR

SEQ ID NO: 42336 - protein, 9 aa, synthetic construct
PVQAGVRLR

SEQ ID NO: 42337 - protein, 9 aa, synthetic construct
PLQGVGRVK

SEQ ID NO: 42338 - protein, 9 aa, synthetic construct
PVQAGLKLK

SEQ ID NO: 42339 - protein, 9 aa, synthetic construct
PVQAGLKVR

SEQ ID NO: 42340 - protein, 9 aa, synthetic construct
PVQAGLKVK

SEQ ID NO: 42341 - protein, 9 aa, synthetic construct
PLQGVGKLK

SEQ ID NO: 42342 - protein, 9 aa, synthetic construct
PVQAGGRVK

SEQ ID NO: 42343 - protein, 9 aa, synthetic construct
PVQAGGKVR

SEQ ID NO: 42344 - protein, 9 aa, synthetic construct
PVPGAVRVR

SEQ ID NO: 42345 - protein, 9 aa, synthetic construct
PVPGAVKVR

SEQ ID NO: 42346 - protein, 9 aa, synthetic construct
PVPGAIKVK

SEQ ID NO: 42347 - protein, 9 aa, synthetic construct
PVPGAGKLK

SEQ ID NO: 42348 - protein, 9 aa, synthetic construct
PVPGTLRVF

SEQ ID NO: 42349 - protein, 9 aa, synthetic construct
PVPGTGKVR

SEQ ID NO: 42350 - protein, 9 aa, synthetic construct
PVPGSVRLR

SEQ ID NO: 42351 - protein, 9 aa, synthetic construct
PVPGSVRLK

SEQ ID NO: 42352 - protein, 9 aa, synthetic construct
PVPGSVRLF

SEQ ID NO: 42353 - protein, 9 aa, synthetic construct
PVPGSVKLR

SEQ ID NO: 42354 - protein, 9 aa, synthetic construct
PLQGGLHLF

SEQ ID NO: 42355 - protein, 9 aa, synthetic construct
PVPGSARVR

SEQ ID NO: 42356 - protein, 9 aa, synthetic construct
PVPGSARVK

SEQ ID NO: 42357 - protein, 9 aa, synthetic construct
PVPGSIRLR

SEQ ID NO: 42358 - protein, 9 aa, synthetic construct
PVPGSIRVH

SEQ ID NO: 42359 - protein, 9 aa, synthetic construct
PVPGSGRVR

SEQ ID NO: 42360 - protein, 9 aa, synthetic construct
PVPGSGRVK

SEQ ID NO: 42361 - protein, 9 aa, synthetic construct
PVPGSGKLR

SEQ ID NO: 42362 - protein, 9 aa, synthetic construct
PVPGSGKVR

SEQ ID NO: 42363 - protein, 9 aa, synthetic construct
PVPGVVRLR

SEQ ID NO: 42364 - protein, 9 aa, synthetic construct
PVPGVVRLH

SEQ ID NO: 42365 - protein, 9 aa, synthetic construct
PVPGVVRLK

SEQ ID NO: 42366 - protein, 9 aa, synthetic construct
PVPGVVKLK

SEQ ID NO: 42367 - protein, 9 aa, synthetic construct
PVPGVVKLF

SEQ ID NO: 42368 - protein, 9 aa, synthetic construct
PVPGVVKVR

SEQ ID NO: 42369 - protein, 9 aa, synthetic construct
PVPGVLRVY

SEQ ID NO: 42370 - protein, 9 aa, synthetic construct
PVPGVLKVR

SEQ ID NO: 42371 - protein, 9 aa, synthetic construct
PVPGVARVK

SEQ ID NO: 42372 - protein, 9 aa, synthetic construct
PLQGGLKVY

SEQ ID NO: 42373 - protein, 9 aa, synthetic construct
PVPGVIRLK

SEQ ID NO: 42374 - protein, 9 aa, synthetic construct
PLQGGLKVR

SEQ ID NO: 42375 - protein, 9 aa, synthetic construct
PVPGVIKLR

SEQ ID NO: 42376 - protein, 9 aa, synthetic construct
PVPGGVRLK

SEQ ID NO: 42377 - protein, 9 aa, synthetic construct
PVPGGVKLR

SEQ ID NO: 42378 - protein, 9 aa, synthetic construct
PVPGGVKVR

SEQ ID NO: 42379 - protein, 9 aa, synthetic construct
PVPGGIKVK

SEQ ID NO: 42380 - protein, 9 aa, synthetic construct
PVPGGGRVK

SEQ ID NO: 42381 - protein, 9 aa, synthetic construct
PVPGGGKLR

SEQ ID NO: 42382 - protein, 9 aa, synthetic construct
PVPGGGKLK

SEQ ID NO: 42383 - protein, 9 aa, synthetic construct
PVPGGGKVR

SEQ ID NO: 42384 - protein, 9 aa, synthetic construct
PLQGGAKLK

SEQ ID NO: 42385 - protein, 9 aa, synthetic construct
PVPAAAKLK

SEQ ID NO: 42386 - protein, 9 aa, synthetic construct
PVPAAGRVR

SEQ ID NO: 42387 - protein, 9 aa, synthetic construct
PVPAAGKVR

SEQ ID NO: 42388 - protein, 9 aa, synthetic construct
PVPAAGKVK

SEQ ID NO: 42389 - protein, 9 aa, synthetic construct
PVPATVRVR

SEQ ID NO: 42390 - protein, 9 aa, synthetic construct
PVPATVKVK

SEQ ID NO: 42391 - protein, 9 aa, synthetic construct
PVPATLRLF

SEQ ID NO: 42392 - protein, 9 aa, synthetic construct
PVPATIRVR

SEQ ID NO: 42393 - protein, 9 aa, synthetic construct
PVPATIKLK

SEQ ID NO: 42394 - protein, 9 aa, synthetic construct
PVPATIKLF

SEQ ID NO: 42395 - protein, 9 aa, synthetic construct
PVPATIKVR

SEQ ID NO: 42396 - protein, 9 aa, synthetic construct
PVPATGRLK

SEQ ID NO: 42397 - protein, 9 aa, synthetic construct
PVPATGRVK

SEQ ID NO: 42398 - protein, 9 aa, synthetic construct
PVPATGKVR

SEQ ID NO: 42399 - protein, 9 aa, synthetic construct
PVPASVHVR

SEQ ID NO: 42400 - protein, 9 aa, synthetic construct
PVPASVHVF

SEQ ID NO: 42401 - protein, 9 aa, synthetic construct
PVPASVRLK

SEQ ID NO: 42402 - protein, 9 aa, synthetic construct
PVPASVRVR

SEQ ID NO: 42403 - protein, 9 aa, synthetic construct
PVPASVKLR

SEQ ID NO: 42404 - protein, 9 aa, synthetic construct
PVPASVKLK

SEQ ID NO: 42405 - protein, 9 aa, synthetic construct
PVPASLRLR

SEQ ID NO: 42406 - protein, 9 aa, synthetic construct
PVPASLRVH

SEQ ID NO: 42407 - protein, 9 aa, synthetic construct
PVPASLKLF

SEQ ID NO: 42408 - protein, 9 aa, synthetic construct
PVPASAKLK

SEQ ID NO: 42409 - protein, 9 aa, synthetic construct
PVPASIRLF

SEQ ID NO: 42410 - protein, 9 aa, synthetic construct
PVPASIRVK

SEQ ID NO: 42411 - protein, 9 aa, synthetic construct
PLQGGIKVR

SEQ ID NO: 42412 - protein, 9 aa, synthetic construct
PVPASGHVY

SEQ ID NO: 42413 - protein, 9 aa, synthetic construct
PVPASGKLR

SEQ ID NO: 42414 - protein, 9 aa, synthetic construct
PVPAVVHVY

SEQ ID NO: 42415 - protein, 9 aa, synthetic construct
PVPAVVRLR

SEQ ID NO: 42416 - protein, 9 aa, synthetic construct
PVPAVVRVR

SEQ ID NO: 42417 - protein, 9 aa, synthetic construct
PVPAVVKLR

SEQ ID NO: 42418 - protein, 9 aa, synthetic construct
PVPAVLHLK

SEQ ID NO: 42419 - protein, 9 aa, synthetic construct
PVPAVLKLY

SEQ ID NO: 42420 - protein, 9 aa, synthetic construct
PVPAVLKLK

SEQ ID NO: 42421 - protein, 9 aa, synthetic construct
PVPAVLKVH

SEQ ID NO: 42422 - protein, 9 aa, synthetic construct
PVPAVARLF

SEQ ID NO: 42423 - protein, 9 aa, synthetic construct
PVPAVARVY

SEQ ID NO: 42424 - protein, 9 aa, synthetic construct
PVPAVARVF

SEQ ID NO: 42425 - protein, 9 aa, synthetic construct
PVPAVAKLK

SEQ ID NO: 42426 - protein, 9 aa, synthetic construct
PVPAVIHVR

SEQ ID NO: 42427 - protein, 9 aa, synthetic construct
PVPAVIRVY

SEQ ID NO: 42428 - protein, 9 aa, synthetic construct
PVPAVIRVF

SEQ ID NO: 42429 - protein, 9 aa, synthetic construct
PVPAVIKLK

SEQ ID NO: 42430 - protein, 9 aa, synthetic construct
PVPAVIKVR

SEQ ID NO: 42431 - protein, 9 aa, synthetic construct
PVPAVIKVK

SEQ ID NO: 42432 - protein, 9 aa, synthetic construct
PVPAVIKVF

SEQ ID NO: 42433 - protein, 9 aa, synthetic construct
PLQGGGRLK

SEQ ID NO: 42434 - protein, 9 aa, synthetic construct
PVPAVGRLR

SEQ ID NO: 42435 - protein, 9 aa, synthetic construct
PVPAVGKLK

SEQ ID NO: 42436 - protein, 9 aa, synthetic construct
PVPAVGKVK

SEQ ID NO: 42437 - protein, 9 aa, synthetic construct
PLQGGGRVR

SEQ ID NO: 42438 - protein, 9 aa, synthetic construct
PVPAGLRLK

SEQ ID NO: 42439 - protein, 9 aa, synthetic construct
PVPAGLRVH

SEQ ID NO: 42440 - protein, 9 aa, synthetic construct
PVPAGLKLF

SEQ ID NO: 42441 - protein, 9 aa, synthetic construct
PLQGGGKLR

SEQ ID NO: 42442 - protein, 9 aa, synthetic construct
PLQGGGKVR

SEQ ID NO: 42443 - protein, 9 aa, synthetic construct
PINGAVKVR

SEQ ID NO: 42444 - protein, 9 aa, synthetic construct
PINGALKVK

SEQ ID NO: 42445 - protein, 9 aa, synthetic construct
PINGAARVK

SEQ ID NO: 42446 - protein, 9 aa, synthetic construct
PLNGTARVR

SEQ ID NO: 42447 - protein, 9 aa, synthetic construct
PINGAIRVK

SEQ ID NO: 42448 - protein, 9 aa, synthetic construct
PINGAIKLR

SEQ ID NO: 42449 - protein, 9 aa, synthetic construct
PLQAAVRVR

SEQ ID NO: 42450 - protein, 9 aa, synthetic construct
PINGTVRLR

SEQ ID NO: 42451 - protein, 9 aa, synthetic construct
PINGTVRVR

SEQ ID NO: 42452 - protein, 9 aa, synthetic construct
PINGTLKVK

SEQ ID NO: 42453 - protein, 9 aa, synthetic construct
PINGTARVK

SEQ ID NO: 42454 - protein, 9 aa, synthetic construct
PLQAAVKVR

SEQ ID NO: 42455 - protein, 9 aa, synthetic construct
PINGTGRVK

SEQ ID NO: 42456 - protein, 9 aa, synthetic construct
PINGTGKVR

SEQ ID NO: 42457 - protein, 9 aa, synthetic construct
PINGSVRVK

SEQ ID NO: 42458 - protein, 9 aa, synthetic construct
PINGSVKLR

SEQ ID NO: 42459 - protein, 9 aa, synthetic construct
PINGSLRVR

SEQ ID NO: 42460 - protein, 9 aa, synthetic construct
PINGSLRVK

SEQ ID NO: 42461 - protein, 9 aa, synthetic construct
PINGSLKVK

SEQ ID NO: 42462 - protein, 9 aa, synthetic construct
PINGSIRVK

SEQ ID NO: 42463 - protein, 9 aa, synthetic construct
PINGSGRVR

SEQ ID NO: 42464 - protein, 9 aa, synthetic construct
PINGVVRVR

SEQ ID NO: 42465 - protein, 9 aa, synthetic construct
PINGVVKLR

SEQ ID NO: 42466 - protein, 9 aa, synthetic construct
PINGVVKLK

SEQ ID NO: 42467 - protein, 9 aa, synthetic construct
PINGVLKVK

SEQ ID NO: 42468 - protein, 9 aa, synthetic construct
PINGVARLK

SEQ ID NO: 42469 - protein, 9 aa, synthetic construct
PINGVIRLK

SEQ ID NO: 42470 - protein, 9 aa, synthetic construct
PINGVIRLF

SEQ ID NO: 42471 - protein, 9 aa, synthetic construct
PINGVIRVK

SEQ ID NO: 42472 - protein, 9 aa, synthetic construct
PINGGVKVR

SEQ ID NO: 42473 - protein, 9 aa, synthetic construct
PINGGLKLR

SEQ ID NO: 42474 - protein, 9 aa, synthetic construct
PINGGLKLK

SEQ ID NO: 42475 - protein, 9 aa, synthetic construct
PINGGLKVK

SEQ ID NO: 42476 - protein, 9 aa, synthetic construct
PINGGIRVR

SEQ ID NO: 42477 - protein, 9 aa, synthetic construct
PINGGIRVK

SEQ ID NO: 42478 - protein, 9 aa, synthetic construct
PINGGGRLR

SEQ ID NO: 42479 - protein, 9 aa, synthetic construct
PINGGGKLK

SEQ ID NO: 42480 - protein, 9 aa, synthetic construct
PINAAVRLK

SEQ ID NO: 42481 - protein, 9 aa, synthetic construct
PINAAVRVR

SEQ ID NO: 42482 - protein, 9 aa, synthetic construct
PINAAVKVR

SEQ ID NO: 42483 - protein, 9 aa, synthetic construct
PINAALRLR

SEQ ID NO: 42484 - protein, 9 aa, synthetic construct
PINAALKLK

SEQ ID NO: 42485 - protein, 9 aa, synthetic construct
PINAAARVK

SEQ ID NO: 42486 - protein, 9 aa, synthetic construct
PLQAAAKLK

SEQ ID NO: 42487 - protein, 9 aa, synthetic construct
PINAAAKLK

SEQ ID NO: 42488 - protein, 9 aa, synthetic construct
PINAAIRVY

SEQ ID NO: 42489 - protein, 9 aa, synthetic construct
PINAAIRVR

SEQ ID NO: 42490 - protein, 9 aa, synthetic construct
PINAAIRVK

SEQ ID NO: 42491 - protein, 9 aa, synthetic construct
PINAAIKVK

SEQ ID NO: 42492 - protein, 9 aa, synthetic construct
PINAAGRLR

SEQ ID NO: 42493 - protein, 9 aa, synthetic construct
PINAAGRLK

SEQ ID NO: 42494 - protein, 9 aa, synthetic construct
PINAAGKVR

SEQ ID NO: 42495 - protein, 9 aa, synthetic construct
PINAAGKVK

SEQ ID NO: 42496 - protein, 9 aa, synthetic construct
PINATVRLK

SEQ ID NO: 42497 - protein, 9 aa, synthetic construct
PINATVRVK

SEQ ID NO: 42498 - protein, 9 aa, synthetic construct
PINATVKVR

SEQ ID NO: 42499 - protein, 9 aa, synthetic construct
PINATVKVK

SEQ ID NO: 42500 - protein, 9 aa, synthetic construct
PINATLRVH

SEQ ID NO: 42501 - protein, 9 aa, synthetic construct
PINATLRVF

SEQ ID NO: 42502 - protein, 9 aa, synthetic construct
PINATLKVY

SEQ ID NO: 42503 - protein, 9 aa, synthetic construct
PINATLKVF

SEQ ID NO: 42504 - protein, 9 aa, synthetic construct
PINATARLK

SEQ ID NO: 42505 - protein, 9 aa, synthetic construct
PINATAKLK

SEQ ID NO: 42506 - protein, 9 aa, synthetic construct
PINATAKVR

SEQ ID NO: 42507 - protein, 9 aa, synthetic construct
PINATIRVR

SEQ ID NO: 42508 - protein, 9 aa, synthetic construct
PINATIRVK

SEQ ID NO: 42509 - protein, 9 aa, synthetic construct
PINATIKVR

SEQ ID NO: 42510 - protein, 9 aa, synthetic construct
PINATGHVY

SEQ ID NO: 42511 - protein, 9 aa, synthetic construct
PINATGRLK

SEQ ID NO: 42512 - protein, 9 aa, synthetic construct
PINATGKLK

SEQ ID NO: 42513 - protein, 9 aa, synthetic construct
PINASVKLR

SEQ ID NO: 42514 - protein, 9 aa, synthetic construct
PLQAAIRVK

SEQ ID NO: 42515 - protein, 9 aa, synthetic construct
PINASLRVR

SEQ ID NO: 42516 - protein, 9 aa, synthetic construct
PINASLRVH

SEQ ID NO: 42517 - protein, 9 aa, synthetic construct
PINASLRVK

SEQ ID NO: 42518 - protein, 9 aa, synthetic construct
PINASLKLR

SEQ ID NO: 42519 - protein, 9 aa, synthetic construct
PINASLKVR

SEQ ID NO: 42520 - protein, 9 aa, synthetic construct
PINASLKVK

SEQ ID NO: 42521 - protein, 9 aa, synthetic construct
PINASIRLK

SEQ ID NO: 42522 - protein, 9 aa, synthetic construct
PINASIRVY

SEQ ID NO: 42523 - protein, 9 aa, synthetic construct
PINASIRVR

SEQ ID NO: 42524 - protein, 9 aa, synthetic construct
PINASIRVK

SEQ ID NO: 42525 - protein, 9 aa, synthetic construct
PINASIRVF

SEQ ID NO: 42526 - protein, 9 aa, synthetic construct
PINASIKLR

SEQ ID NO: 42527 - protein, 9 aa, synthetic construct
PINASIKVR

SEQ ID NO: 42528 - protein, 9 aa, synthetic construct
PINASGRLH

SEQ ID NO: 42529 - protein, 9 aa, synthetic construct
PINASGRVH

SEQ ID NO: 42530 - protein, 9 aa, synthetic construct
PINASGRVK

SEQ ID NO: 42531 - protein, 9 aa, synthetic construct
PINAVVHVY

SEQ ID NO: 42532 - protein, 9 aa, synthetic construct
PINAVVKLK

SEQ ID NO: 42533 - protein, 9 aa, synthetic construct
PINAVVKVR

SEQ ID NO: 42534 - protein, 9 aa, synthetic construct
PINAVLHLR

SEQ ID NO: 42535 - protein, 9 aa, synthetic construct
PINAVLHVY

SEQ ID NO: 42536 - protein, 9 aa, synthetic construct
PINAVLRVK

SEQ ID NO: 42537 - protein, 9 aa, synthetic construct
PINAVLKLY

SEQ ID NO: 42538 - protein, 9 aa, synthetic construct
PINAVLKLK

SEQ ID NO: 42539 - protein, 9 aa, synthetic construct
PINAVLKVR

SEQ ID NO: 42540 - protein, 9 aa, synthetic construct
PINAVIHLY

SEQ ID NO: 42541 - protein, 9 aa, synthetic construct
PINAVIRVY

SEQ ID NO: 42542 - protein, 9 aa, synthetic construct
PINAVIRVR

SEQ ID NO: 42543 - protein, 9 aa, synthetic construct
PINAVIRVK

SEQ ID NO: 42544 - protein, 9 aa, synthetic construct
PINAVIKLR

SEQ ID NO: 42545 - protein, 9 aa, synthetic construct
PINAVIKVR

SEQ ID NO: 42546 - protein, 9 aa, synthetic construct
PINAVGRLK

SEQ ID NO: 42547 - protein, 9 aa, synthetic construct
PINAVGRVK

SEQ ID NO: 42548 - protein, 9 aa, synthetic construct
PLQAAGRVR

SEQ ID NO: 42549 - protein, 9 aa, synthetic construct
PINAGVRLR

SEQ ID NO: 42550 - protein, 9 aa, synthetic construct
PINAGVRLK

SEQ ID NO: 42551 - protein, 9 aa, synthetic construct
PINAGVKLR

SEQ ID NO: 42552 - protein, 9 aa, synthetic construct
PINAGVKLK

SEQ ID NO: 42553 - protein, 9 aa, synthetic construct
PINAGLKVK

SEQ ID NO: 42554 - protein, 9 aa, synthetic construct
PLQAAGKLK

SEQ ID NO: 42555 - protein, 9 aa, synthetic construct
PINAGIRVY

SEQ ID NO: 42556 - protein, 9 aa, synthetic construct
PLQAAGKVR

SEQ ID NO: 42557 - protein, 9 aa, synthetic construct
PINAGIKVK

SEQ ID NO: 42558 - protein, 9 aa, synthetic construct
PLQAAGKVK

SEQ ID NO: 42559 - protein, 9 aa, synthetic construct
PIQGAVKVR

SEQ ID NO: 42560 - protein, 9 aa, synthetic construct
PIQGALKVR

SEQ ID NO: 42561 - protein, 9 aa, synthetic construct
PLQATVRLY

SEQ ID NO: 42562 - protein, 9 aa, synthetic construct
PLQATVRLK

SEQ ID NO: 42563 - protein, 9 aa, synthetic construct
PIQGAGRLK

SEQ ID NO: 42564 - protein, 9 aa, synthetic construct
PLQATVRLF

SEQ ID NO: 42565 - protein, 9 aa, synthetic construct
PIQGAGKLR

SEQ ID NO: 42566 - protein, 9 aa, synthetic construct
PIQGAGKLK

SEQ ID NO: 42567 - protein, 9 aa, synthetic construct
PIQGAGKVK

SEQ ID NO: 42568 - protein, 9 aa, synthetic construct
PIQGTVKVK

SEQ ID NO: 42569 - protein, 9 aa, synthetic construct
PIQGTLRLH

SEQ ID NO: 42570 - protein, 9 aa, synthetic construct
PIQGTLRVF

SEQ ID NO: 42571 - protein, 9 aa, synthetic construct
PIQGTLKLR

SEQ ID NO: 42572 - protein, 9 aa, synthetic construct
PIQGTLKVR

SEQ ID NO: 42573 - protein, 9 aa, synthetic construct
PIQGTARVR

SEQ ID NO: 42574 - protein, 9 aa, synthetic construct
PIQGTARVK

SEQ ID NO: 42575 - protein, 9 aa, synthetic construct
PIQGTIRLK

SEQ ID NO: 42576 - protein, 9 aa, synthetic construct
PIQGTGKLK

SEQ ID NO: 42577 - protein, 9 aa, synthetic construct
PIQGTGKVR

SEQ ID NO: 42578 - protein, 9 aa, synthetic construct
PIQGSARVH

SEQ ID NO: 42579 - protein, 9 aa, synthetic construct
PLQATLRLR

SEQ ID NO: 42580 - protein, 9 aa, synthetic construct
PIQGSIKLK

SEQ ID NO: 42581 - protein, 9 aa, synthetic construct
PIQGSIKVK

SEQ ID NO: 42582 - protein, 9 aa, synthetic construct
PIQGSGKLR

SEQ ID NO: 42583 - protein, 9 aa, synthetic construct
PIQGSGKLK

SEQ ID NO: 42584 - protein, 9 aa, synthetic construct
PIQGSGKVR

SEQ ID NO: 42585 - protein, 9 aa, synthetic construct
PIQGSGKVK

SEQ ID NO: 42586 - protein, 9 aa, synthetic construct
PIQGVVKVK

SEQ ID NO: 42587 - protein, 9 aa, synthetic construct
PIQGVLHVR

SEQ ID NO: 42588 - protein, 9 aa, synthetic construct
PIQGVLRLK

SEQ ID NO: 42589 - protein, 9 aa, synthetic construct
PIQGVLRVK

SEQ ID NO: 42590 - protein, 9 aa, synthetic construct
PIQGVLKVR

SEQ ID NO: 42591 - protein, 9 aa, synthetic construct
PIQGVLKVF

SEQ ID NO: 42592 - protein, 9 aa, synthetic construct
PIQGVAKLF

SEQ ID NO: 42593 - protein, 9 aa, synthetic construct
PIQGVIHLF

SEQ ID NO: 42594 - protein, 9 aa, synthetic construct
PLQATLKVR

SEQ ID NO: 42595 - protein, 9 aa, synthetic construct
PLQATLKVK

SEQ ID NO: 42596 - protein, 9 aa, synthetic construct
PIQGVGKLK

SEQ ID NO: 42597 - protein, 9 aa, synthetic construct
PIQGVGKVK

SEQ ID NO: 42598 - protein, 9 aa, synthetic construct
PIQGGVRLR

SEQ ID NO: 42599 - protein, 9 aa, synthetic construct
PIQGGVRLK

SEQ ID NO: 42600 - protein, 9 aa, synthetic construct
PIQGGVRVK

SEQ ID NO: 42601 - protein, 9 aa, synthetic construct
PIQGGVKLK

SEQ ID NO: 42602 - protein, 9 aa, synthetic construct
PLQATARLR

SEQ ID NO: 42603 - protein, 9 aa, synthetic construct
PIQGGIKVK

SEQ ID NO: 42604 - protein, 9 aa, synthetic construct
PLQATARLK

SEQ ID NO: 42605 - protein, 9 aa, synthetic construct
PIQGGGKLK

SEQ ID NO: 42606 - protein, 9 aa, synthetic construct
PIQGGGKVR

SEQ ID NO: 42607 - protein, 9 aa, synthetic construct
PIQAAVRLR

SEQ ID NO: 42608 - protein, 9 aa, synthetic construct
PIQAAVRVR

SEQ ID NO: 42609 - protein, 9 aa, synthetic construct
PIQAAVKVR

SEQ ID NO: 42610 - protein, 9 aa, synthetic construct
PLQATARVK

SEQ ID NO: 42611 - protein, 9 aa, synthetic construct
PIQAALRLK

SEQ ID NO: 42612 - protein, 9 aa, synthetic construct
PLQATAKLK

SEQ ID NO: 42613 - protein, 9 aa, synthetic construct
PIQAAGRLR

SEQ ID NO: 42614 - protein, 9 aa, synthetic construct
PIQAAGKLK

SEQ ID NO: 42615 - protein, 9 aa, synthetic construct
PIQAAGKVR

SEQ ID NO: 42616 - protein, 9 aa, synthetic construct
PIQAAGKVK

SEQ ID NO: 42617 - protein, 9 aa, synthetic construct
PIQATVRLY

SEQ ID NO: 42618 - protein, 9 aa, synthetic construct
PIQATVRLK

SEQ ID NO: 42619 - protein, 9 aa, synthetic construct
PIQATVRLF

SEQ ID NO: 42620 - protein, 9 aa, synthetic construct
PIQATVRVY

SEQ ID NO: 42621 - protein, 9 aa, synthetic construct
PIQATVKLR

SEQ ID NO: 42622 - protein, 9 aa, synthetic construct
PIQATVKVK

SEQ ID NO: 42623 - protein, 9 aa, synthetic construct
PIQATLKLK

SEQ ID NO: 42624 - protein, 9 aa, synthetic construct
PIQATLKVR

SEQ ID NO: 42625 - protein, 9 aa, synthetic construct
PIQATARVR

SEQ ID NO: 42626 - protein, 9 aa, synthetic construct
PIQATAKLK

SEQ ID NO: 42627 - protein, 9 aa, synthetic construct
PIQATIRVR

SEQ ID NO: 42628 - protein, 9 aa, synthetic construct
PIQATIKVK

SEQ ID NO: 42629 - protein, 9 aa, synthetic construct
PIQATGRVR

SEQ ID NO: 42630 - protein, 9 aa, synthetic construct
PIQATGKLR

SEQ ID NO: 42631 - protein, 9 aa, synthetic construct
PIQATGKLK

SEQ ID NO: 42632 - protein, 9 aa, synthetic construct
PIQASVRLK

SEQ ID NO: 42633 - protein, 9 aa, synthetic construct
PIQASVRLF

SEQ ID NO: 42634 - protein, 9 aa, synthetic construct
PIQASVRVY

SEQ ID NO: 42635 - protein, 9 aa, synthetic construct
PIQASLRLH

SEQ ID NO: 42636 - protein, 9 aa, synthetic construct
PIQASLRLK

SEQ ID NO: 42637 - protein, 9 aa, synthetic construct
PIQASLKLH

SEQ ID NO: 42638 - protein, 9 aa, synthetic construct
PIQASARLH

SEQ ID NO: 42639 - protein, 9 aa, synthetic construct
PIQASARVY

SEQ ID NO: 42640 - protein, 9 aa, synthetic construct
PIQASARVK

SEQ ID NO: 42641 - protein, 9 aa, synthetic construct
PLQATIKVR

SEQ ID NO: 42642 - protein, 9 aa, synthetic construct
PIQASGRLK

SEQ ID NO: 42643 - protein, 9 aa, synthetic construct
PIQASGKLK

SEQ ID NO: 42644 - protein, 9 aa, synthetic construct
PIQASGKVR

SEQ ID NO: 42645 - protein, 9 aa, synthetic construct
PIQAVVRLY

SEQ ID NO: 42646 - protein, 9 aa, synthetic construct
PIQAVVRLH

SEQ ID NO: 42647 - protein, 9 aa, synthetic construct
PIQAVVRVH

SEQ ID NO: 42648 - protein, 9 aa, synthetic construct
PIQAVVKLK

SEQ ID NO: 42649 - protein, 9 aa, synthetic construct
PIQAVLRVF

SEQ ID NO: 42650 - protein, 9 aa, synthetic construct
PIQAVLKVR

SEQ ID NO: 42651 - protein, 9 aa, synthetic construct
PIQAVARLF

SEQ ID NO: 42652 - protein, 9 aa, synthetic construct
PIQAVARVF

SEQ ID NO: 42653 - protein, 9 aa, synthetic construct
PIQAVIHVY

SEQ ID NO: 42654 - protein, 9 aa, synthetic construct
PLNGTIRLK

SEQ ID NO: 42655 - protein, 9 aa, synthetic construct
PIQAVIRLK

SEQ ID NO: 42656 - protein, 9 aa, synthetic construct
PIQAVIRVR

SEQ ID NO: 42657 - protein, 9 aa, synthetic construct
PIQAVIRVK

SEQ ID NO: 42658 - protein, 9 aa, synthetic construct
PIQAVIKVR

SEQ ID NO: 42659 - protein, 9 aa, synthetic construct
PIQAVIKVK

SEQ ID NO: 42660 - protein, 9 aa, synthetic construct
PIQAVIKVF

SEQ ID NO: 42661 - protein, 9 aa, synthetic construct
PIQAVGRLR

SEQ ID NO: 42662 - protein, 9 aa, synthetic construct
PIQAVGRLK

SEQ ID NO: 42663 - protein, 9 aa, synthetic construct
PIQAVGRVR

SEQ ID NO: 42664 - protein, 9 aa, synthetic construct
PIQAVGRVK

SEQ ID NO: 42665 - protein, 9 aa, synthetic construct
PIQAGVRLR

SEQ ID NO: 42666 - protein, 9 aa, synthetic construct
PIQAGLHVK

SEQ ID NO: 42667 - protein, 9 aa, synthetic construct
PIQAGLKLY

SEQ ID NO: 42668 - protein, 9 aa, synthetic construct
PIQAGLKVR

SEQ ID NO: 42669 - protein, 9 aa, synthetic construct
PLQATGKLR

SEQ ID NO: 42670 - protein, 9 aa, synthetic construct
PIQAGARLH

SEQ ID NO: 42671 - protein, 9 aa, synthetic construct
PIQAGARLF

SEQ ID NO: 42672 - protein, 9 aa, synthetic construct
PIQAGARVK

SEQ ID NO: 42673 - protein, 9 aa, synthetic construct
PLQATGKLK

SEQ ID NO: 42674 - protein, 9 aa, synthetic construct
PIQAGIRLK

SEQ ID NO: 42675 - protein, 9 aa, synthetic construct
PIQAGIKVK

SEQ ID NO: 42676 - protein, 9 aa, synthetic construct
PIQAGGRLK

SEQ ID NO: 42677 - protein, 9 aa, synthetic construct
PIQAGGRVK

SEQ ID NO: 42678 - protein, 9 aa, synthetic construct
PIQAGGKVR

SEQ ID NO: 42679 - protein, 9 aa, synthetic construct
PIQAGGKVK

SEQ ID NO: 42680 - protein, 9 aa, synthetic construct
PIPGAVRVR

SEQ ID NO: 42681 - protein, 9 aa, synthetic construct
PIPGAVKLR

SEQ ID NO: 42682 - protein, 9 aa, synthetic construct
PIPGAVKVR

SEQ ID NO: 42683 - protein, 9 aa, synthetic construct
PIPGALRLH

SEQ ID NO: 42684 - protein, 9 aa, synthetic construct
PIPGALKVR

SEQ ID NO: 42685 - protein, 9 aa, synthetic construct
PIPGAGKLR

SEQ ID NO: 42686 - protein, 9 aa, synthetic construct
PLQASVRVK

SEQ ID NO: 42687 - protein, 9 aa, synthetic construct
PIPGTARLR

SEQ ID NO: 42688 - protein, 9 aa, synthetic construct
PIPGTIRVR

SEQ ID NO: 42689 - protein, 9 aa, synthetic construct
PIPGTIRVK

SEQ ID NO: 42690 - protein, 9 aa, synthetic construct
PIPGTIRVF

SEQ ID NO: 42691 - protein, 9 aa, synthetic construct
PIPGTIKLK

SEQ ID NO: 42692 - protein, 9 aa, synthetic construct
PIPGTIKVK

SEQ ID NO: 42693 - protein, 9 aa, synthetic construct
PIPGTGKLK

SEQ ID NO: 42694 - protein, 9 aa, synthetic construct
PIPGSVRLK

SEQ ID NO: 42695 - protein, 9 aa, synthetic construct
PIPGSVRVR

SEQ ID NO: 42696 - protein, 9 aa, synthetic construct
PIPGSVKLR

SEQ ID NO: 42697 - protein, 9 aa, synthetic construct
PIPGSLKVR

SEQ ID NO: 42698 - protein, 9 aa, synthetic construct
PIPGSARLR

SEQ ID NO: 42699 - protein, 9 aa, synthetic construct
PIPGSGRVK

SEQ ID NO: 42700 - protein, 9 aa, synthetic construct
PIPGVVRLF

SEQ ID NO: 42701 - protein, 9 aa, synthetic construct
PIPGVLRLF

SEQ ID NO: 42702 - protein, 9 aa, synthetic construct
PLQASLKLH

SEQ ID NO: 42703 - protein, 9 aa, synthetic construct
PIPGVIHLY

SEQ ID NO: 42704 - protein, 9 aa, synthetic construct
PIPGVIRLK

SEQ ID NO: 42705 - protein, 9 aa, synthetic construct
PIPGVIRVR

SEQ ID NO: 42706 - protein, 9 aa, synthetic construct
PIPGVIKLK

SEQ ID NO: 42707 - protein, 9 aa, synthetic construct
PIPGGLKVR

SEQ ID NO: 42708 - protein, 9 aa, synthetic construct
PIPGGAKVK

SEQ ID NO: 42709 - protein, 9 aa, synthetic construct
PIPGGIKLK

SEQ ID NO: 42710 - protein, 9 aa, synthetic construct
PIPGGGRVK

SEQ ID NO: 42711 - protein, 9 aa, synthetic construct
PIPGGGKLR

SEQ ID NO: 42712 - protein, 9 aa, synthetic construct
PIPGGGKLK

SEQ ID NO: 42713 - protein, 9 aa, synthetic construct
PIPAAVKVR

SEQ ID NO: 42714 - protein, 9 aa, synthetic construct
PLQASAKLK

SEQ ID NO: 42715 - protein, 9 aa, synthetic construct
PIPAAIRVK

SEQ ID NO: 42716 - protein, 9 aa, synthetic construct
PIPAAIKVK

SEQ ID NO: 42717 - protein, 9 aa, synthetic construct
PIPAAGKVR

SEQ ID NO: 42718 - protein, 9 aa, synthetic construct
PIPATVRLK

SEQ ID NO: 42719 - protein, 9 aa, synthetic construct
PIPATVKVK

SEQ ID NO: 42720 - protein, 9 aa, synthetic construct
PIPATLRVR

SEQ ID NO: 42721 - protein, 9 aa, synthetic construct
PIPATLKVR

SEQ ID NO: 42722 - protein, 9 aa, synthetic construct
PIPATARLR

SEQ ID NO: 42723 - protein, 9 aa, synthetic construct
PIPATARLK

SEQ ID NO: 42724 - protein, 9 aa, synthetic construct
PIPATARVR

SEQ ID NO: 42725 - protein, 9 aa, synthetic construct
PIPATARVK

SEQ ID NO: 42726 - protein, 9 aa, synthetic construct
PIPATAKLK

SEQ ID NO: 42727 - protein, 9 aa, synthetic construct
PIPATAKVR

SEQ ID NO: 42728 - protein, 9 aa, synthetic construct
PIPATIRLK

SEQ ID NO: 42729 - protein, 9 aa, synthetic construct
PIPATIRVR

SEQ ID NO: 42730 - protein, 9 aa, synthetic construct
PIPATIRVK

SEQ ID NO: 42731 - protein, 9 aa, synthetic construct
PLQASIRLR

SEQ ID NO: 42732 - protein, 9 aa, synthetic construct
PIPASVRLR

SEQ ID NO: 42733 - protein, 9 aa, synthetic construct
PIPASVRLH

SEQ ID NO: 42734 - protein, 9 aa, synthetic construct
PIPASVRVR

SEQ ID NO: 42735 - protein, 9 aa, synthetic construct
PIPASVKLR

SEQ ID NO: 42736 - protein, 9 aa, synthetic construct
PIPASLRLK

SEQ ID NO: 42737 - protein, 9 aa, synthetic construct
PIPASLKLK

SEQ ID NO: 42738 - protein, 9 aa, synthetic construct
PIPASLKVR

SEQ ID NO: 42739 - protein, 9 aa, synthetic construct
PIPASLKVK

SEQ ID NO: 42740 - protein, 9 aa, synthetic construct
PIPASARVK

SEQ ID NO: 42741 - protein, 9 aa, synthetic construct
PIPASAKVR

SEQ ID NO: 42742 - protein, 9 aa, synthetic construct
PLQASIKVR

SEQ ID NO: 42743 - protein, 9 aa, synthetic construct
PLQASIKVK

SEQ ID NO: 42744 - protein, 9 aa, synthetic construct
PLQASIKVF

SEQ ID NO: 42745 - protein, 9 aa, synthetic construct
PIPASGKLR

SEQ ID NO: 42746 - protein, 9 aa, synthetic construct
PIPAVVRVR

SEQ ID NO: 42747 - protein, 9 aa, synthetic construct
PIPAVLRVF

SEQ ID NO: 42748 - protein, 9 aa, synthetic construct
PIPAVIRLY

SEQ ID NO: 42749 - protein, 9 aa, synthetic construct
PIPAVIRLK

SEQ ID NO: 42750 - protein, 9 aa, synthetic construct
PIPAVIRVF

SEQ ID NO: 42751 - protein, 9 aa, synthetic construct
PIPAVGRVK

SEQ ID NO: 42752 - protein, 9 aa, synthetic construct
PIPAVGKLR

SEQ ID NO: 42753 - protein, 9 aa, synthetic construct
PIPAVGKLK

SEQ ID NO: 42754 - protein, 9 aa, synthetic construct
PIPAVGKVK

SEQ ID NO: 42755 - protein, 9 aa, synthetic construct
PIPAGVRVR

SEQ ID NO: 42756 - protein, 9 aa, synthetic construct
PIPAGVKLR

SEQ ID NO: 42757 - protein, 9 aa, synthetic construct
PIPAGIRLR

SEQ ID NO: 42758 - protein, 9 aa, synthetic construct
GLNGAVHVR

SEQ ID NO: 42759 - protein, 9 aa, synthetic construct
GLNGAVRVR

SEQ ID NO: 42760 - protein, 9 aa, synthetic construct
GLNGALKVK

SEQ ID NO: 42761 - protein, 9 aa, synthetic construct
GLNGAAKLK

SEQ ID NO: 42762 - protein, 9 aa, synthetic construct
GLNGAIRLF

SEQ ID NO: 42763 - protein, 9 aa, synthetic construct
GLNGAIRVH

SEQ ID NO: 42764 - protein, 9 aa, synthetic construct
GLNGAIRVF

SEQ ID NO: 42765 - protein, 9 aa, synthetic construct
GLNGAIKVK

SEQ ID NO: 42766 - protein, 9 aa, synthetic construct
GLNGAGRLK

SEQ ID NO: 42767 - protein, 9 aa, synthetic construct
PLQAVVRLF

SEQ ID NO: 42768 - protein, 9 aa, synthetic construct
GLNGAGKLR

SEQ ID NO: 42769 - protein, 9 aa, synthetic construct
GLNGAGKVK

SEQ ID NO: 42770 - protein, 9 aa, synthetic construct
PLQAVVRVR

SEQ ID NO: 42771 - protein, 9 aa, synthetic construct
GLNGTLHLH

SEQ ID NO: 42772 - protein, 9 aa, synthetic construct
GLNGTLRLH

SEQ ID NO: 42773 - protein, 9 aa, synthetic construct
PLQAVVKLK

SEQ ID NO: 42774 - protein, 9 aa, synthetic construct
GLNGTIKVK

SEQ ID NO: 42775 - protein, 9 aa, synthetic construct
GLNGTIKVF

SEQ ID NO: 42776 - protein, 9 aa, synthetic construct
GLNGTGKLK

SEQ ID NO: 42777 - protein, 9 aa, synthetic construct
GLNGTGKVK

SEQ ID NO: 42778 - protein, 9 aa, synthetic construct
GLNGSVHVR

SEQ ID NO: 42779 - protein, 9 aa, synthetic construct
GLNGSVRVK

SEQ ID NO: 42780 - protein, 9 aa, synthetic construct
GLNGSVKLK

SEQ ID NO: 42781 - protein, 9 aa, synthetic construct
GLNGSARLH

SEQ ID NO: 42782 - protein, 9 aa, synthetic construct
GLNGSARLF

SEQ ID NO: 42783 - protein, 9 aa, synthetic construct
GLNGSIKLY

SEQ ID NO: 42784 - protein, 9 aa, synthetic construct
GLNGSIKLF

SEQ ID NO: 42785 - protein, 9 aa, synthetic construct
GLNGSIKVY

SEQ ID NO: 42786 - protein, 9 aa, synthetic construct
GLNGSIKVK

SEQ ID NO: 42787 - protein, 9 aa, synthetic construct
GLNGSGRVY

SEQ ID NO: 42788 - protein, 9 aa, synthetic construct
GLNGSGRVK

SEQ ID NO: 42789 - protein, 9 aa, synthetic construct
GLNGSGKVR

SEQ ID NO: 42790 - protein, 9 aa, synthetic construct
GLNGSGKVK

SEQ ID NO: 42791 - protein, 9 aa, synthetic construct
GLNGVVRVK

SEQ ID NO: 42792 - protein, 9 aa, synthetic construct
GLNGVVKLK

SEQ ID NO: 42793 - protein, 9 aa, synthetic construct
GLNGVVKVR

SEQ ID NO: 42794 - protein, 9 aa, synthetic construct
GLNGVLHVH

SEQ ID NO: 42795 - protein, 9 aa, synthetic construct
GLNGVLKLK

SEQ ID NO: 42796 - protein, 9 aa, synthetic construct
PLQAVLKLH

SEQ ID NO: 42797 - protein, 9 aa, synthetic construct
GLNGVIRVY

SEQ ID NO: 42798 - protein, 9 aa, synthetic construct
GLNGVIRVK

SEQ ID NO: 42799 - protein, 9 aa, synthetic construct
PLQAVLKVR

SEQ ID NO: 42800 - protein, 9 aa, synthetic construct
GLNGVIKVF

SEQ ID NO: 42801 - protein, 9 aa, synthetic construct
GLNGVGHLR

SEQ ID NO: 42802 - protein, 9 aa, synthetic construct
GLNGVGHLF

SEQ ID NO: 42803 - protein, 9 aa, synthetic construct
PLQAVLKVK

SEQ ID NO: 42804 - protein, 9 aa, synthetic construct
GLNGVGKVR

SEQ ID NO: 42805 - protein, 9 aa, synthetic construct
GLNGGVRVR

SEQ ID NO: 42806 - protein, 9 aa, synthetic construct
GLNGGLRVR

SEQ ID NO: 42807 - protein, 9 aa, synthetic construct
GLNGGIKLH

SEQ ID NO: 42808 - protein, 9 aa, synthetic construct
GLNGGIKLF

SEQ ID NO: 42809 - protein, 9 aa, synthetic construct
PLQAVARLH

SEQ ID NO: 42810 - protein, 9 aa, synthetic construct
GLNGGGKVR

SEQ ID NO: 42811 - protein, 9 aa, synthetic construct
GLNAAVRLK

SEQ ID NO: 42812 - protein, 9 aa, synthetic construct
GLNAALHVY

SEQ ID NO: 42813 - protein, 9 aa, synthetic construct
GLNAALKVY

SEQ ID NO: 42814 - protein, 9 aa, synthetic construct
GLNAALKVR

SEQ ID NO: 42815 - protein, 9 aa, synthetic construct
GLNAALKVH

SEQ ID NO: 42816 - protein, 9 aa, synthetic construct
GLNAALKVK

SEQ ID NO: 42817 - protein, 9 aa, synthetic construct
GLNAAIRLY

SEQ ID NO: 42818 - protein, 9 aa, synthetic construct
GLNAAIRVY

SEQ ID NO: 42819 - protein, 9 aa, synthetic construct
GLNAAGHVR

SEQ ID NO: 42820 - protein, 9 aa, synthetic construct
GLNAAGRLR

SEQ ID NO: 42821 - protein, 9 aa, synthetic construct
GLNAAGKLR

SEQ ID NO: 42822 - protein, 9 aa, synthetic construct
GLNAAGKLK

SEQ ID NO: 42823 - protein, 9 aa, synthetic construct
GLNATVRLY

SEQ ID NO: 42824 - protein, 9 aa, synthetic construct
GLNATLHVY

SEQ ID NO: 42825 - protein, 9 aa, synthetic construct
GLNATLHVH

SEQ ID NO: 42826 - protein, 9 aa, synthetic construct
GLNATLRLR

SEQ ID NO: 42827 - protein, 9 aa, synthetic construct
GLNATLRLK

SEQ ID NO: 42828 - protein, 9 aa, synthetic construct
GLNATLKVH

SEQ ID NO: 42829 - protein, 9 aa, synthetic construct
GLNATARVK

SEQ ID NO: 42830 - protein, 9 aa, synthetic construct
GLNATIKVY

SEQ ID NO: 42831 - protein, 9 aa, synthetic construct
GLNATGHVY

SEQ ID NO: 42832 - protein, 9 aa, synthetic construct
GLNATGHVK

SEQ ID NO: 42833 - protein, 9 aa, synthetic construct
PLQAVIRLF

SEQ ID NO: 42834 - protein, 9 aa, synthetic construct
PLQAVIRVY

SEQ ID NO: 42835 - protein, 9 aa, synthetic construct
GLNASVHLF

SEQ ID NO: 42836 - protein, 9 aa, synthetic construct
PLQAVIRVR

SEQ ID NO: 42837 - protein, 9 aa, synthetic construct
GLNASVKVR

SEQ ID NO: 42838 - protein, 9 aa, synthetic construct
GLNASARVH

SEQ ID NO: 42839 - protein, 9 aa, synthetic construct
PLQAVIKVY

SEQ ID NO: 42840 - protein, 9 aa, synthetic construct
GLNASIRLR

SEQ ID NO: 42841 - protein, 9 aa, synthetic construct
PLQAVIKVK

SEQ ID NO: 42842 - protein, 9 aa, synthetic construct
GLNASGRVY

SEQ ID NO: 42843 - protein, 9 aa, synthetic construct
GLNASGRVH

SEQ ID NO: 42844 - protein, 9 aa, synthetic construct
PLQAVIKVF

SEQ ID NO: 42845 - protein, 9 aa, synthetic construct
GLNASGKLH

SEQ ID NO: 42846 - protein, 9 aa, synthetic construct
GLNAVVRVR

SEQ ID NO: 42847 - protein, 9 aa, synthetic construct
GLNAVVRVK

SEQ ID NO: 42848 - protein, 9 aa, synthetic construct
GLNAVVRVF

SEQ ID NO: 42849 - protein, 9 aa, synthetic construct
GLNAVVKVY

SEQ ID NO: 42850 - protein, 9 aa, synthetic construct
GLNAVLHVH

SEQ ID NO: 42851 - protein, 9 aa, synthetic construct
GLNAVLRVH

SEQ ID NO: 42852 - protein, 9 aa, synthetic construct
GLNAVLKLY

SEQ ID NO: 42853 - protein, 9 aa, synthetic construct
GLNAVLKLR

SEQ ID NO: 42854 - protein, 9 aa, synthetic construct
GLNAVLKLK

SEQ ID NO: 42855 - protein, 9 aa, synthetic construct
GLNAVLKVY

SEQ ID NO: 42856 - protein, 9 aa, synthetic construct
GLNAVLKVH

SEQ ID NO: 42857 - protein, 9 aa, synthetic construct
GLNAVAHLY

SEQ ID NO: 42858 - protein, 9 aa, synthetic construct
GLNAVAHLH

SEQ ID NO: 42859 - protein, 9 aa, synthetic construct
GLNAVAHVY

SEQ ID NO: 42860 - protein, 9 aa, synthetic construct
GLNAVAKLK

SEQ ID NO: 42861 - protein, 9 aa, synthetic construct
GLNAVAKLF

SEQ ID NO: 42862 - protein, 9 aa, synthetic construct
GLNAVAKVY

SEQ ID NO: 42863 - protein, 9 aa, synthetic construct
PLNGTGRLK

SEQ ID NO: 42864 - protein, 9 aa, synthetic construct
GLNAVIRLK

SEQ ID NO: 42865 - protein, 9 aa, synthetic construct
GLNAVIRVY

SEQ ID NO: 42866 - protein, 9 aa, synthetic construct
PLQAVGRLR

SEQ ID NO: 42867 - protein, 9 aa, synthetic construct
GLNAVGHVR

SEQ ID NO: 42868 - protein, 9 aa, synthetic construct
GLNAVGRLH

SEQ ID NO: 42869 - protein, 9 aa, synthetic construct
GLNAVGKVK

SEQ ID NO: 42870 - protein, 9 aa, synthetic construct
GLNAGVHLK

SEQ ID NO: 42871 - protein, 9 aa, synthetic construct
GLNAGVKLR

SEQ ID NO: 42872 - protein, 9 aa, synthetic construct
GLNAGVKVY

SEQ ID NO: 42873 - protein, 9 aa, synthetic construct
GLNAGVKVH

SEQ ID NO: 42874 - protein, 9 aa, synthetic construct
PLQAVGRVK

SEQ ID NO: 42875 - protein, 9 aa, synthetic construct
GLNAGARLH

SEQ ID NO: 42876 - protein, 9 aa, synthetic construct
GLNAGIHVF

SEQ ID NO: 42877 - protein, 9 aa, synthetic construct
GLNAGIRLY

SEQ ID NO: 42878 - protein, 9 aa, synthetic construct
GLNAGIRLH

SEQ ID NO: 42879 - protein, 9 aa, synthetic construct
PLQAVGKVR

SEQ ID NO: 42880 - protein, 9 aa, synthetic construct
GLNAGGHVH

SEQ ID NO: 42881 - protein, 9 aa, synthetic construct
PLQAVGKVK

SEQ ID NO: 42882 - protein, 9 aa, synthetic construct
GLQGAVKLK

SEQ ID NO: 42883 - protein, 9 aa, synthetic construct
GLQGAAKVR

SEQ ID NO: 42884 - protein, 9 aa, synthetic construct
GLQGAIRLF

SEQ ID NO: 42885 - protein, 9 aa, synthetic construct
GLQGAIRVR

SEQ ID NO: 42886 - protein, 9 aa, synthetic construct
GLQGAIRVK

SEQ ID NO: 42887 - protein, 9 aa, synthetic construct
GLQGAGKVK

SEQ ID NO: 42888 - protein, 9 aa, synthetic construct
GLQGTVKLK

SEQ ID NO: 42889 - protein, 9 aa, synthetic construct
GLQGTVKVK

SEQ ID NO: 42890 - protein, 9 aa, synthetic construct
GLQGTVKVF

SEQ ID NO: 42891 - protein, 9 aa, synthetic construct
GLQGTLHVF

SEQ ID NO: 42892 - protein, 9 aa, synthetic construct
GLQGTLRVY

SEQ ID NO: 42893 - protein, 9 aa, synthetic construct
GLQGTLKLY

SEQ ID NO: 42894 - protein, 9 aa, synthetic construct
GLQGTLKLR

SEQ ID NO: 42895 - protein, 9 aa, synthetic construct
GLQGTLKVH

SEQ ID NO: 42896 - protein, 9 aa, synthetic construct
GLQGTLKVF

SEQ ID NO: 42897 - protein, 9 aa, synthetic construct
GLQGTARLH

SEQ ID NO: 42898 - protein, 9 aa, synthetic construct
GLQGTARVR

SEQ ID NO: 42899 - protein, 9 aa, synthetic construct
GLQGTAKVR

SEQ ID NO: 42900 - protein, 9 aa, synthetic construct
GLQGTIRVY

SEQ ID NO: 42901 - protein, 9 aa, synthetic construct
GLQGTIRVF

SEQ ID NO: 42902 - protein, 9 aa, synthetic construct
GLQGTGHVY

SEQ ID NO: 42903 - protein, 9 aa, synthetic construct
GLQGTGKVR

SEQ ID NO: 42904 - protein, 9 aa, synthetic construct
PLNGTGRVK

SEQ ID NO: 42905 - protein, 9 aa, synthetic construct
GLQGSVHLK

SEQ ID NO: 42906 - protein, 9 aa, synthetic construct
GLQGSVKLR

SEQ ID NO: 42907 - protein, 9 aa, synthetic construct
GLQGSLHVF

SEQ ID NO: 42908 - protein, 9 aa, synthetic construct
GLQGSLKLH

SEQ ID NO: 42909 - protein, 9 aa, synthetic construct
GLQGSLKVF

SEQ ID NO: 42910 - protein, 9 aa, synthetic construct
GLQGSARLH

SEQ ID NO: 42911 - protein, 9 aa, synthetic construct
GLQGSARLF

SEQ ID NO: 42912 - protein, 9 aa, synthetic construct
GLQGSGHLR

SEQ ID NO: 42913 - protein, 9 aa, synthetic construct
GLQGSGHVR

SEQ ID NO: 42914 - protein, 9 aa, synthetic construct
GLQGSGRLK

SEQ ID NO: 42915 - protein, 9 aa, synthetic construct
GLQGSGKLH

SEQ ID NO: 42916 - protein, 9 aa, synthetic construct
GLQGSGKVY

SEQ ID NO: 42917 - protein, 9 aa, synthetic construct
GLQGSGKVK

SEQ ID NO: 42918 - protein, 9 aa, synthetic construct
GLQGSGKVF

SEQ ID NO: 42919 - protein, 9 aa, synthetic construct
GLQGVVKVR

SEQ ID NO: 42920 - protein, 9 aa, synthetic construct
GLQGVVKVK

SEQ ID NO: 42921 - protein, 9 aa, synthetic construct
GLQGVLRLR

SEQ ID NO: 42922 - protein, 9 aa, synthetic construct
GLQGVLRVY

SEQ ID NO: 42923 - protein, 9 aa, synthetic construct
GLQGVARLK

SEQ ID NO: 42924 - protein, 9 aa, synthetic construct
GLQGVARLF

SEQ ID NO: 42925 - protein, 9 aa, synthetic construct
GLQGVIRLF

SEQ ID NO: 42926 - protein, 9 aa, synthetic construct
GLQGVIRVK

SEQ ID NO: 42927 - protein, 9 aa, synthetic construct
GLQGVGKLR

SEQ ID NO: 42928 - protein, 9 aa, synthetic construct
GLQGGVKVH

SEQ ID NO: 42929 - protein, 9 aa, synthetic construct
GLQGGLRLF

SEQ ID NO: 42930 - protein, 9 aa, synthetic construct
GLQGGLKVR

SEQ ID NO: 42931 - protein, 9 aa, synthetic construct
GLQGGAHVY

SEQ ID NO: 42932 - protein, 9 aa, synthetic construct
GLQGGAHVH

SEQ ID NO: 42933 - protein, 9 aa, synthetic construct
GLQGGARLY

SEQ ID NO: 42934 - protein, 9 aa, synthetic construct
GLQGGARLH

SEQ ID NO: 42935 - protein, 9 aa, synthetic construct
GLQGGARVH

SEQ ID NO: 42936 - protein, 9 aa, synthetic construct
GLQGGIRVY

SEQ ID NO: 42937 - protein, 9 aa, synthetic construct
GLQGGIRVF

SEQ ID NO: 42938 - protein, 9 aa, synthetic construct
GLQGGIKLK

SEQ ID NO: 42939 - protein, 9 aa, synthetic construct
GLQGGIKVR

SEQ ID NO: 42940 - protein, 9 aa, synthetic construct
GLQGGIKVK

SEQ ID NO: 42941 - protein, 9 aa, synthetic construct
GLQGGIKVF

SEQ ID NO: 42942 - protein, 9 aa, synthetic construct
GLQGGGRVK

SEQ ID NO: 42943 - protein, 9 aa, synthetic construct
PLQAGARLF

SEQ ID NO: 42944 - protein, 9 aa, synthetic construct
GLQAAVHLF

SEQ ID NO: 42945 - protein, 9 aa, synthetic construct
GLQAAVRLK

SEQ ID NO: 42946 - protein, 9 aa, synthetic construct
GLQAAVRVR

SEQ ID NO: 42947 - protein, 9 aa, synthetic construct
GLQAAVRVK

SEQ ID NO: 42948 - protein, 9 aa, synthetic construct
GLQAALRLH

SEQ ID NO: 42949 - protein, 9 aa, synthetic construct
GLQAALRVY

SEQ ID NO: 42950 - protein, 9 aa, synthetic construct
GLQAALRVH

SEQ ID NO: 42951 - protein, 9 aa, synthetic construct
PLNGTGKLK

SEQ ID NO: 42952 - protein, 9 aa, synthetic construct
GLQAALKLY

SEQ ID NO: 42953 - protein, 9 aa, synthetic construct
GLQAALKLH

SEQ ID NO: 42954 - protein, 9 aa, synthetic construct
GLQAALKLK

SEQ ID NO: 42955 - protein, 9 aa, synthetic construct
GLQAAARLK

SEQ ID NO: 42956 - protein, 9 aa, synthetic construct
GLQAAIRLK

SEQ ID NO: 42957 - protein, 9 aa, synthetic construct
PLQAGAKVR

SEQ ID NO: 42958 - protein, 9 aa, synthetic construct
GLQAAGRLK

SEQ ID NO: 42959 - protein, 9 aa, synthetic construct
GLQAAGKLK

SEQ ID NO: 42960 - protein, 9 aa, synthetic construct
GLQATVRLF

SEQ ID NO: 42961 - protein, 9 aa, synthetic construct
GLQATVKVF

SEQ ID NO: 42962 - protein, 9 aa, synthetic construct
GLQATGRVH

SEQ ID NO: 42963 - protein, 9 aa, synthetic construct
GLQASVHLK

SEQ ID NO: 42964 - protein, 9 aa, synthetic construct
GLQASVRLH

SEQ ID NO: 42965 - protein, 9 aa, synthetic construct
GLQASVRVY

SEQ ID NO: 42966 - protein, 9 aa, synthetic construct
GLQASVRVR

SEQ ID NO: 42967 - protein, 9 aa, synthetic construct
GLQASLRLF

SEQ ID NO: 42968 - protein, 9 aa, synthetic construct
GLQASLKVK

SEQ ID NO: 42969 - protein, 9 aa, synthetic construct
GLQASARVF

SEQ ID NO: 42970 - protein, 9 aa, synthetic construct
GLQASIRLR

SEQ ID NO: 42971 - protein, 9 aa, synthetic construct
GLQASIKVY

SEQ ID NO: 42972 - protein, 9 aa, synthetic construct
GLQASGRLR

SEQ ID NO: 42973 - protein, 9 aa, synthetic construct
GLQASGRVF

SEQ ID NO: 42974 - protein, 9 aa, synthetic construct
GLQAVVRVK

SEQ ID NO: 42975 - protein, 9 aa, synthetic construct
GLQAVVKVK

SEQ ID NO: 42976 - protein, 9 aa, synthetic construct
GLQAVLHVH

SEQ ID NO: 42977 - protein, 9 aa, synthetic construct
GLQAVLKLY

SEQ ID NO: 42978 - protein, 9 aa, synthetic construct
GLQAVLKLR

SEQ ID NO: 42979 - protein, 9 aa, synthetic construct
GLQAVLKLK

SEQ ID NO: 42980 - protein, 9 aa, synthetic construct
GLQAVAHVR

SEQ ID NO: 42981 - protein, 9 aa, synthetic construct
GLQAVARLF

SEQ ID NO: 42982 - protein, 9 aa, synthetic construct
GLQAVARVY

SEQ ID NO: 42983 - protein, 9 aa, synthetic construct
GLQAVARVR

SEQ ID NO: 42984 - protein, 9 aa, synthetic construct
GLQAVAKLR

SEQ ID NO: 42985 - protein, 9 aa, synthetic construct
GLQAVIHLR

SEQ ID NO: 42986 - protein, 9 aa, synthetic construct
GLQAVIHVY

SEQ ID NO: 42987 - protein, 9 aa, synthetic construct
GLQAVIRLH

SEQ ID NO: 42988 - protein, 9 aa, synthetic construct
GLQAVIRVR

SEQ ID NO: 42989 - protein, 9 aa, synthetic construct
GLQAVGRVR

SEQ ID NO: 42990 - protein, 9 aa, synthetic construct
GLQAVGRVK

SEQ ID NO: 42991 - protein, 9 aa, synthetic construct
GLQAVGKVR

SEQ ID NO: 42992 - protein, 9 aa, synthetic construct
GLQAGVRLK

SEQ ID NO: 42993 - protein, 9 aa, synthetic construct
GLQAGVRLF

SEQ ID NO: 42994 - protein, 9 aa, synthetic construct
GLQAGVRVK

SEQ ID NO: 42995 - protein, 9 aa, synthetic construct
GLQAGAHVF

SEQ ID NO: 42996 - protein, 9 aa, synthetic construct
GLQAGARLY

SEQ ID NO: 42997 - protein, 9 aa, synthetic construct
GLQAGARLH

SEQ ID NO: 42998 - protein, 9 aa, synthetic construct
GLQAGARLF

SEQ ID NO: 42999 - protein, 9 aa, synthetic construct
GLQAGAKLR

SEQ ID NO: 43000 - protein, 9 aa, synthetic construct
GLQAGAKLH

SEQ ID NO: 43001 - protein, 9 aa, synthetic construct
GLQAGIHVH

SEQ ID NO: 43002 - protein, 9 aa, synthetic construct
GLQAGIRLY

SEQ ID NO: 43003 - protein, 9 aa, synthetic construct
GLQAGIRVY

SEQ ID NO: 43004 - protein, 9 aa, synthetic construct
GLQAGGHLY

SEQ ID NO: 43005 - protein, 9 aa, synthetic construct
GLQAGGHVK

SEQ ID NO: 43006 - protein, 9 aa, synthetic construct
GLQAGGRVK

SEQ ID NO: 43007 - protein, 9 aa, synthetic construct
GLQAGGKVY

SEQ ID NO: 43008 - protein, 9 aa, synthetic construct
GLQAGGKVR

SEQ ID NO: 43009 - protein, 9 aa, synthetic construct
GLPGALHLH

SEQ ID NO: 43010 - protein, 9 aa, synthetic construct
GLPGALKVR

SEQ ID NO: 43011 - protein, 9 aa, synthetic construct
GLPGAAHVR

SEQ ID NO: 43012 - protein, 9 aa, synthetic construct
GLPGAARLK

SEQ ID NO: 43013 - protein, 9 aa, synthetic construct
PLPGAVRLK

SEQ ID NO: 43014 - protein, 9 aa, synthetic construct
GLPGAGKLR

SEQ ID NO: 43015 - protein, 9 aa, synthetic construct
GLPGTIRLK

SEQ ID NO: 43016 - protein, 9 aa, synthetic construct
GLPGTIRLF

SEQ ID NO: 43017 - protein, 9 aa, synthetic construct
GLPGTGKLK

SEQ ID NO: 43018 - protein, 9 aa, synthetic construct
GLPGTGKVR

SEQ ID NO: 43019 - protein, 9 aa, synthetic construct
GLPGTGKVK

SEQ ID NO: 43020 - protein, 9 aa, synthetic construct
GLPGSLHLR

SEQ ID NO: 43021 - protein, 9 aa, synthetic construct
GLPGSLKVY

SEQ ID NO: 43022 - protein, 9 aa, synthetic construct
GLPGSAKVY

SEQ ID NO: 43023 - protein, 9 aa, synthetic construct
GLPGSIHLF

SEQ ID NO: 43024 - protein, 9 aa, synthetic construct
GLPGSIRLH

SEQ ID NO: 43025 - protein, 9 aa, synthetic construct
GLPGSIRVH

SEQ ID NO: 43026 - protein, 9 aa, synthetic construct
GLPGSIRVK

SEQ ID NO: 43027 - protein, 9 aa, synthetic construct
PLPGALRLH

SEQ ID NO: 43028 - protein, 9 aa, synthetic construct
GLPGSGKLR

SEQ ID NO: 43029 - protein, 9 aa, synthetic construct
GLPGVVHLR

SEQ ID NO: 43030 - protein, 9 aa, synthetic construct
GLPGVVRLF

SEQ ID NO: 43031 - protein, 9 aa, synthetic construct
GLPGVVRVY

SEQ ID NO: 43032 - protein, 9 aa, synthetic construct
GLPGVVRVF

SEQ ID NO: 43033 - protein, 9 aa, synthetic construct
GLPGVLRLY

SEQ ID NO: 43034 - protein, 9 aa, synthetic construct
GLPGVAHVY

SEQ ID NO: 43035 - protein, 9 aa, synthetic construct
GLPGVIHLH

SEQ ID NO: 43036 - protein, 9 aa, synthetic construct
GLPGVIHVF

SEQ ID NO: 43037 - protein, 9 aa, synthetic construct
GLPGVIRLH

SEQ ID NO: 43038 - protein, 9 aa, synthetic construct
GLPGVIRVK

SEQ ID NO: 43039 - protein, 9 aa, synthetic construct
GLPGVIKLK

SEQ ID NO: 43040 - protein, 9 aa, synthetic construct
GLPGVIKVY

SEQ ID NO: 43041 - protein, 9 aa, synthetic construct
GLPGVIKVH

SEQ ID NO: 43042 - protein, 9 aa, synthetic construct
GLPGVGHLF

SEQ ID NO: 43043 - protein, 9 aa, synthetic construct
PLPGALKVK

SEQ ID NO: 43044 - protein, 9 aa, synthetic construct
GLPGVGKLR

SEQ ID NO: 43045 - protein, 9 aa, synthetic construct
GLPGGVRLH

SEQ ID NO: 43046 - protein, 9 aa, synthetic construct
GLPGGVRLF

SEQ ID NO: 43047 - protein, 9 aa, synthetic construct
GLPGGVKLR

SEQ ID NO: 43048 - protein, 9 aa, synthetic construct
GLPGGVKVR

SEQ ID NO: 43049 - protein, 9 aa, synthetic construct
GLPGGLRVR

SEQ ID NO: 43050 - protein, 9 aa, synthetic construct
GLPGGLKVY

SEQ ID NO: 43051 - protein, 9 aa, synthetic construct
GLPGGAHVH

SEQ ID NO: 43052 - protein, 9 aa, synthetic construct
GLPGGARLH

SEQ ID NO: 43053 - protein, 9 aa, synthetic construct
GLPGGARVH

SEQ ID NO: 43054 - protein, 9 aa, synthetic construct
GLPGGIKLK

SEQ ID NO: 43055 - protein, 9 aa, synthetic construct
GLPGGGHVF

SEQ ID NO: 43056 - protein, 9 aa, synthetic construct
GLPAAVRVR

SEQ ID NO: 43057 - protein, 9 aa, synthetic construct
GLPAAVKVR

SEQ ID NO: 43058 - protein, 9 aa, synthetic construct
GLPAAVKVK

SEQ ID NO: 43059 - protein, 9 aa, synthetic construct
GLPAALHLY

SEQ ID NO: 43060 - protein, 9 aa, synthetic construct
GLPAALHLF

SEQ ID NO: 43061 - protein, 9 aa, synthetic construct
GLPAALHVY

SEQ ID NO: 43062 - protein, 9 aa, synthetic construct
GLPAALRVY

SEQ ID NO: 43063 - protein, 9 aa, synthetic construct
GLPAALKVR

SEQ ID NO: 43064 - protein, 9 aa, synthetic construct
PLPGAAKVR

SEQ ID NO: 43065 - protein, 9 aa, synthetic construct
GLPATVRLR

SEQ ID NO: 43066 - protein, 9 aa, synthetic construct
GLPATVRLF

SEQ ID NO: 43067 - protein, 9 aa, synthetic construct
GLPATLRLK

SEQ ID NO: 43068 - protein, 9 aa, synthetic construct
GLPATLRLF

SEQ ID NO: 43069 - protein, 9 aa, synthetic construct
GLPATLKLH

SEQ ID NO: 43070 - protein, 9 aa, synthetic construct
GLPATARLK

SEQ ID NO: 43071 - protein, 9 aa, synthetic construct
GLPATAKLK

SEQ ID NO: 43072 - protein, 9 aa, synthetic construct
PLPGAIRLK

SEQ ID NO: 43073 - protein, 9 aa, synthetic construct
GLPASVHVF

SEQ ID NO: 43074 - protein, 9 aa, synthetic construct
GLPASVRVR

SEQ ID NO: 43075 - protein, 9 aa, synthetic construct
GLPASLHLH

SEQ ID NO: 43076 - protein, 9 aa, synthetic construct
PLPGAIKLR

SEQ ID NO: 43077 - protein, 9 aa, synthetic construct
GLPASARVK

SEQ ID NO: 43078 - protein, 9 aa, synthetic construct
GLPASIHVF

SEQ ID NO: 43079 - protein, 9 aa, synthetic construct
GLPASIRLH

SEQ ID NO: 43080 - protein, 9 aa, synthetic construct
GLPASIRVK

SEQ ID NO: 43081 - protein, 9 aa, synthetic construct
GLPASIRVF

SEQ ID NO: 43082 - protein, 9 aa, synthetic construct
GLPASGKLK

SEQ ID NO: 43083 - protein, 9 aa, synthetic construct
GLPAVVHVY

SEQ ID NO: 43084 - protein, 9 aa, synthetic construct
GLPAVVRVK

SEQ ID NO: 43085 - protein, 9 aa, synthetic construct
GLPAVLHLK

SEQ ID NO: 43086 - protein, 9 aa, synthetic construct
GLPAVLKVR

SEQ ID NO: 43087 - protein, 9 aa, synthetic construct
GLPAVARVF

SEQ ID NO: 43088 - protein, 9 aa, synthetic construct
GLPAVIRLH

SEQ ID NO: 43089 - protein, 9 aa, synthetic construct
GLPAVIKLK

SEQ ID NO: 43090 - protein, 9 aa, synthetic construct
GLPAVGKLK

SEQ ID NO: 43091 - protein, 9 aa, synthetic construct
GLPAGVKLR

SEQ ID NO: 43092 - protein, 9 aa, synthetic construct
GLPAGVKLK

SEQ ID NO: 43093 - protein, 9 aa, synthetic construct
GLPAGVKVY

SEQ ID NO: 43094 - protein, 9 aa, synthetic construct
GLPAGLKVK

SEQ ID NO: 43095 - protein, 9 aa, synthetic construct
GLPAGARLK

SEQ ID NO: 43096 - protein, 9 aa, synthetic construct
PLPGAGKLK

SEQ ID NO: 43097 - protein, 9 aa, synthetic construct
GLPAGIRVY

SEQ ID NO: 43098 - protein, 9 aa, synthetic construct
GLPAGIKVY

SEQ ID NO: 43099 - protein, 9 aa, synthetic construct
GLPAGIKVK

SEQ ID NO: 43100 - protein, 9 aa, synthetic construct
GLPAGIKVF

SEQ ID NO: 43101 - protein, 9 aa, synthetic construct
GLPAGGRVK

SEQ ID NO: 43102 - protein, 9 aa, synthetic construct
GTNGAVRVK

SEQ ID NO: 43103 - protein, 9 aa, synthetic construct
GTNGAVKVR

SEQ ID NO: 43104 - protein, 9 aa, synthetic construct
GTNGALHVF

SEQ ID NO: 43105 - protein, 9 aa, synthetic construct
GTNGALKVK

SEQ ID NO: 43106 - protein, 9 aa, synthetic construct
GTNGAIRVK

SEQ ID NO: 43107 - protein, 9 aa, synthetic construct
PLPGTVRLR

SEQ ID NO: 43108 - protein, 9 aa, synthetic construct
GTNGAIKVK

SEQ ID NO: 43109 - protein, 9 aa, synthetic construct
GTNGAGRLK

SEQ ID NO: 43110 - protein, 9 aa, synthetic construct
GTNGAGKLK

SEQ ID NO: 43111 - protein, 9 aa, synthetic construct
GTNGAGKVR

SEQ ID NO: 43112 - protein, 9 aa, synthetic construct
PLPGTVRVR

SEQ ID NO: 43113 - protein, 9 aa, synthetic construct
GTNGTVRVR

SEQ ID NO: 43114 - protein, 9 aa, synthetic construct
GTNGTVKVK

SEQ ID NO: 43115 - protein, 9 aa, synthetic construct
GTNGTLKVK

SEQ ID NO: 43116 - protein, 9 aa, synthetic construct
GTNGTARLK

SEQ ID NO: 43117 - protein, 9 aa, synthetic construct
GTNGTARVR

SEQ ID NO: 43118 - protein, 9 aa, synthetic construct
GTNGTIRVY

SEQ ID NO: 43119 - protein, 9 aa, synthetic construct
GTNGTIRVR

SEQ ID NO: 43120 - protein, 9 aa, synthetic construct
GTNGTIRVK

SEQ ID NO: 43121 - protein, 9 aa, synthetic construct
GTNGTIKVK

SEQ ID NO: 43122 - protein, 9 aa, synthetic construct
GTNGTGRLK

SEQ ID NO: 43123 - protein, 9 aa, synthetic construct
GTNGTGKVK

SEQ ID NO: 43124 - protein, 9 aa, synthetic construct
PLNGSVRVK

SEQ ID NO: 43125 - protein, 9 aa, synthetic construct
GTNGSVRVK

SEQ ID NO: 43126 - protein, 9 aa, synthetic construct
GTNGSVKLR

SEQ ID NO: 43127 - protein, 9 aa, synthetic construct
GTNGSLRLY

SEQ ID NO: 43128 - protein, 9 aa, synthetic construct
GTNGSLKVY

SEQ ID NO: 43129 - protein, 9 aa, synthetic construct
GTNGSLKVR

SEQ ID NO: 43130 - protein, 9 aa, synthetic construct
GTNGSLKVK

SEQ ID NO: 43131 - protein, 9 aa, synthetic construct
GTNGSIKVK

SEQ ID NO: 43132 - protein, 9 aa, synthetic construct
GTNGSGHVR

SEQ ID NO: 43133 - protein, 9 aa, synthetic construct
GTNGSGRLH

SEQ ID NO: 43134 - protein, 9 aa, synthetic construct
GTNGSGRLK

SEQ ID NO: 43135 - protein, 9 aa, synthetic construct
GTNGVVRLK

SEQ ID NO: 43136 - protein, 9 aa, synthetic construct
GTNGVVRVR

SEQ ID NO: 43137 - protein, 9 aa, synthetic construct
GTNGVVKLK

SEQ ID NO: 43138 - protein, 9 aa, synthetic construct
GTNGVLRLK

SEQ ID NO: 43139 - protein, 9 aa, synthetic construct
GTNGVLKLK

SEQ ID NO: 43140 - protein, 9 aa, synthetic construct
GTNGVLKVK

SEQ ID NO: 43141 - protein, 9 aa, synthetic construct
GTNGVIRLK

SEQ ID NO: 43142 - protein, 9 aa, synthetic construct
GTNGVIRVY

SEQ ID NO: 43143 - protein, 9 aa, synthetic construct
GTNGVIRVK

SEQ ID NO: 43144 - protein, 9 aa, synthetic construct
GTNGVIRVF

SEQ ID NO: 43145 - protein, 9 aa, synthetic construct
PLPGTLKVR

SEQ ID NO: 43146 - protein, 9 aa, synthetic construct
GTNGVIKLR

SEQ ID NO: 43147 - protein, 9 aa, synthetic construct
GTNGVIKVY

SEQ ID NO: 43148 - protein, 9 aa, synthetic construct
GTNGVIKVF

SEQ ID NO: 43149 - protein, 9 aa, synthetic construct
GTNGVGHLF

SEQ ID NO: 43150 - protein, 9 aa, synthetic construct
PLPGTLKVK

SEQ ID NO: 43151 - protein, 9 aa, synthetic construct
GTNGVGRVK

SEQ ID NO: 43152 - protein, 9 aa, synthetic construct
GTNGGVRVR

SEQ ID NO: 43153 - protein, 9 aa, synthetic construct
GTNGGARVK

SEQ ID NO: 43154 - protein, 9 aa, synthetic construct
GTNGGIRVK

SEQ ID NO: 43155 - protein, 9 aa, synthetic construct
GTNGGIKLR

SEQ ID NO: 43156 - protein, 9 aa, synthetic construct
GTNGGIKLK

SEQ ID NO: 43157 - protein, 9 aa, synthetic construct
GTNGGIKVK

SEQ ID NO: 43158 - protein, 9 aa, synthetic construct
GTNGGGRLR

SEQ ID NO: 43159 - protein, 9 aa, synthetic construct
GTNGGGKLR

SEQ ID NO: 43160 - protein, 9 aa, synthetic construct
GTNGGGKLK

SEQ ID NO: 43161 - protein, 9 aa, synthetic construct
GTNAAVRLK

SEQ ID NO: 43162 - protein, 9 aa, synthetic construct
GTNAAVRVR

SEQ ID NO: 43163 - protein, 9 aa, synthetic construct
GTNAAVKVR

SEQ ID NO: 43164 - protein, 9 aa, synthetic construct
GTNAALRLK

SEQ ID NO: 43165 - protein, 9 aa, synthetic construct
GTNAALRLF

SEQ ID NO: 43166 - protein, 9 aa, synthetic construct
GTNAALRVY

SEQ ID NO: 43167 - protein, 9 aa, synthetic construct
GTNAALKLR

SEQ ID NO: 43168 - protein, 9 aa, synthetic construct
GTNAALKVK

SEQ ID NO: 43169 - protein, 9 aa, synthetic construct
GTNAAARVK

SEQ ID NO: 43170 - protein, 9 aa, synthetic construct
GTNAAAKLR

SEQ ID NO: 43171 - protein, 9 aa, synthetic construct
GTNAAAKVR

SEQ ID NO: 43172 - protein, 9 aa, synthetic construct
GTNAAIRLK

SEQ ID NO: 43173 - protein, 9 aa, synthetic construct
GTNAAIRVR

SEQ ID NO: 43174 - protein, 9 aa, synthetic construct
GTNAAIKLR

SEQ ID NO: 43175 - protein, 9 aa, synthetic construct
GTNAAIKVK

SEQ ID NO: 43176 - protein, 9 aa, synthetic construct
GTNAAGHVR

SEQ ID NO: 43177 - protein, 9 aa, synthetic construct
GTNAAGKLR

SEQ ID NO: 43178 - protein, 9 aa, synthetic construct
GTNAAGKLK

SEQ ID NO: 43179 - protein, 9 aa, synthetic construct
GTNAAGKVK

SEQ ID NO: 43180 - protein, 9 aa, synthetic construct
GTNATVHLR

SEQ ID NO: 43181 - protein, 9 aa, synthetic construct
GTNATVRLY

SEQ ID NO: 43182 - protein, 9 aa, synthetic construct
GTNATVRLR

SEQ ID NO: 43183 - protein, 9 aa, synthetic construct
GTNATVRVK

SEQ ID NO: 43184 - protein, 9 aa, synthetic construct
GTNATVKLK

SEQ ID NO: 43185 - protein, 9 aa, synthetic construct
GTNATLRLH

SEQ ID NO: 43186 - protein, 9 aa, synthetic construct
GTNATLRVR

SEQ ID NO: 43187 - protein, 9 aa, synthetic construct
GTNATLRVH

SEQ ID NO: 43188 - protein, 9 aa, synthetic construct
GTNATLKVF

SEQ ID NO: 43189 - protein, 9 aa, synthetic construct
GTNATARLY

SEQ ID NO: 43190 - protein, 9 aa, synthetic construct
GTNATARLK

SEQ ID NO: 43191 - protein, 9 aa, synthetic construct
GTNATAKLK

SEQ ID NO: 43192 - protein, 9 aa, synthetic construct
GTNATIHLY

SEQ ID NO: 43193 - protein, 9 aa, synthetic construct
GTNATIHLR

SEQ ID NO: 43194 - protein, 9 aa, synthetic construct
GTNATIHVH

SEQ ID NO: 43195 - protein, 9 aa, synthetic construct
GTNATIRLY

SEQ ID NO: 43196 - protein, 9 aa, synthetic construct
GTNATIRLH

SEQ ID NO: 43197 - protein, 9 aa, synthetic construct
GTNATIRVK

SEQ ID NO: 43198 - protein, 9 aa, synthetic construct
GTNATGHVY

SEQ ID NO: 43199 - protein, 9 aa, synthetic construct
GTNATGHVR

SEQ ID NO: 43200 - protein, 9 aa, synthetic construct
PLPGTIRLK

SEQ ID NO: 43201 - protein, 9 aa, synthetic construct
GTNATGRLR

SEQ ID NO: 43202 - protein, 9 aa, synthetic construct
GTNATGRLK

SEQ ID NO: 43203 - protein, 9 aa, synthetic construct
GTNATGRVR

SEQ ID NO: 43204 - protein, 9 aa, synthetic construct
GTNATGKLK

SEQ ID NO: 43205 - protein, 9 aa, synthetic construct
GTNASVRVK

SEQ ID NO: 43206 - protein, 9 aa, synthetic construct
GTNASVKLH

SEQ ID NO: 43207 - protein, 9 aa, synthetic construct
GTNASVKVK

SEQ ID NO: 43208 - protein, 9 aa, synthetic construct
PLPGTIRVK

SEQ ID NO: 43209 - protein, 9 aa, synthetic construct
GTNASLHVY

SEQ ID NO: 43210 - protein, 9 aa, synthetic construct
GTNASARLF

SEQ ID NO: 43211 - protein, 9 aa, synthetic construct
PLPGTIKLK

SEQ ID NO: 43212 - protein, 9 aa, synthetic construct
GTNASIHLH

SEQ ID NO: 43213 - protein, 9 aa, synthetic construct
GTNASIHLF

SEQ ID NO: 43214 - protein, 9 aa, synthetic construct
GTNASIHVY

SEQ ID NO: 43215 - protein, 9 aa, synthetic construct
GTNASIRVH

SEQ ID NO: 43216 - protein, 9 aa, synthetic construct
GTNASIRVK

SEQ ID NO: 43217 - protein, 9 aa, synthetic construct
GTNASIKVK

SEQ ID NO: 43218 - protein, 9 aa, synthetic construct
GTNASGHVR

SEQ ID NO: 43219 - protein, 9 aa, synthetic construct
GTNASGRLY

SEQ ID NO: 43220 - protein, 9 aa, synthetic construct
GTNASGRVH

SEQ ID NO: 43221 - protein, 9 aa, synthetic construct
GTNASGRVK

SEQ ID NO: 43222 - protein, 9 aa, synthetic construct
GTNASGKLH

SEQ ID NO: 43223 - protein, 9 aa, synthetic construct
GTNAVVRLY

SEQ ID NO: 43224 - protein, 9 aa, synthetic construct
GTNAVVRLK

SEQ ID NO: 43225 - protein, 9 aa, synthetic construct
GTNAVVRVY

SEQ ID NO: 43226 - protein, 9 aa, synthetic construct
GTNAVVKLK

SEQ ID NO: 43227 - protein, 9 aa, synthetic construct
GTNAVVKVR

SEQ ID NO: 43228 - protein, 9 aa, synthetic construct
GTNAVLHVY

SEQ ID NO: 43229 - protein, 9 aa, synthetic construct
GTNAVLHVK

SEQ ID NO: 43230 - protein, 9 aa, synthetic construct
GTNAVLRLY

SEQ ID NO: 43231 - protein, 9 aa, synthetic construct
GTNAVLRVK

SEQ ID NO: 43232 - protein, 9 aa, synthetic construct
GTNAVLKLR

SEQ ID NO: 43233 - protein, 9 aa, synthetic construct
GTNAVAHLR

SEQ ID NO: 43234 - protein, 9 aa, synthetic construct
GTNAVAHLF

SEQ ID NO: 43235 - protein, 9 aa, synthetic construct
GTNAVARLF

SEQ ID NO: 43236 - protein, 9 aa, synthetic construct
GTNAVARVH

SEQ ID NO: 43237 - protein, 9 aa, synthetic construct
GTNAVARVF

SEQ ID NO: 43238 - protein, 9 aa, synthetic construct
GTNAVIHLY

SEQ ID NO: 43239 - protein, 9 aa, synthetic construct
GTNAVIHLR

SEQ ID NO: 43240 - protein, 9 aa, synthetic construct
GTNAVIHLK

SEQ ID NO: 43241 - protein, 9 aa, synthetic construct
GTNAVIHVY

SEQ ID NO: 43242 - protein, 9 aa, synthetic construct
GTNAVIRLK

SEQ ID NO: 43243 - protein, 9 aa, synthetic construct
GTNAVIRVR

SEQ ID NO: 43244 - protein, 9 aa, synthetic construct
GTNAVIKLY

SEQ ID NO: 43245 - protein, 9 aa, synthetic construct
GTNAVIKVK

SEQ ID NO: 43246 - protein, 9 aa, synthetic construct
GTNAVGRLH

SEQ ID NO: 43247 - protein, 9 aa, synthetic construct
GTNAVGRLK

SEQ ID NO: 43248 - protein, 9 aa, synthetic construct
GTNAVGRVK

SEQ ID NO: 43249 - protein, 9 aa, synthetic construct
GTNAVGKVR

SEQ ID NO: 43250 - protein, 9 aa, synthetic construct
GTNAVGKVK

SEQ ID NO: 43251 - protein, 9 aa, synthetic construct
GTNAGVKLR

SEQ ID NO: 43252 - protein, 9 aa, synthetic construct
GTNAGVKLK

SEQ ID NO: 43253 - protein, 9 aa, synthetic construct
GTNAGVKVR

SEQ ID NO: 43254 - protein, 9 aa, synthetic construct
GTNAGLRVH

SEQ ID NO: 43255 - protein, 9 aa, synthetic construct
GTNAGLKLH

SEQ ID NO: 43256 - protein, 9 aa, synthetic construct
GTNAGLKLK

SEQ ID NO: 43257 - protein, 9 aa, synthetic construct
GTQGAVRVR

SEQ ID NO: 43258 - protein, 9 aa, synthetic construct
GTQGAVRVK

SEQ ID NO: 43259 - protein, 9 aa, synthetic construct
GTQGAVKVK

SEQ ID NO: 43260 - protein, 9 aa, synthetic construct
GTQGALRLF

SEQ ID NO: 43261 - protein, 9 aa, synthetic construct
GTQGALRVH

SEQ ID NO: 43262 - protein, 9 aa, synthetic construct
GTQGALRVF

SEQ ID NO: 43263 - protein, 9 aa, synthetic construct
GTQGALKVK

SEQ ID NO: 43264 - protein, 9 aa, synthetic construct
GTQGAARVK

SEQ ID NO: 43265 - protein, 9 aa, synthetic construct
GTQGAAKVR

SEQ ID NO: 43266 - protein, 9 aa, synthetic construct
GTQGAIRLK

SEQ ID NO: 43267 - protein, 9 aa, synthetic construct
PLPGSVRLR

SEQ ID NO: 43268 - protein, 9 aa, synthetic construct
GTQGAIKLR

SEQ ID NO: 43269 - protein, 9 aa, synthetic construct
PLPGSVRLK

SEQ ID NO: 43270 - protein, 9 aa, synthetic construct
GTQGAGRLR

SEQ ID NO: 43271 - protein, 9 aa, synthetic construct
GTQGAGRLK

SEQ ID NO: 43272 - protein, 9 aa, synthetic construct
GTQGAGKLR

SEQ ID NO: 43273 - protein, 9 aa, synthetic construct
GTQGAGKLK

SEQ ID NO: 43274 - protein, 9 aa, synthetic construct
GTQGAGKVR

SEQ ID NO: 43275 - protein, 9 aa, synthetic construct
GTQGAGKVK

SEQ ID NO: 43276 - protein, 9 aa, synthetic construct
GTQGTVRVK

SEQ ID NO: 43277 - protein, 9 aa, synthetic construct
GTQGTLRVY

SEQ ID NO: 43278 - protein, 9 aa, synthetic construct
GTQGTLRVR

SEQ ID NO: 43279 - protein, 9 aa, synthetic construct
GTQGTLKLF

SEQ ID NO: 43280 - protein, 9 aa, synthetic construct
GTQGTLKVY

SEQ ID NO: 43281 - protein, 9 aa, synthetic construct
GTQGTARLK

SEQ ID NO: 43282 - protein, 9 aa, synthetic construct
GTQGTARVR

SEQ ID NO: 43283 - protein, 9 aa, synthetic construct
GTQGTARVH

SEQ ID NO: 43284 - protein, 9 aa, synthetic construct
GTQGTARVK

SEQ ID NO: 43285 - protein, 9 aa, synthetic construct
GTQGTAKLR

SEQ ID NO: 43286 - protein, 9 aa, synthetic construct
GTQGTAKVK

SEQ ID NO: 43287 - protein, 9 aa, synthetic construct
GTQGTIRVF

SEQ ID NO: 43288 - protein, 9 aa, synthetic construct
GTQGTGRLK

SEQ ID NO: 43289 - protein, 9 aa, synthetic construct
GTQGTGKVR

SEQ ID NO: 43290 - protein, 9 aa, synthetic construct
GTQGTGKVK

SEQ ID NO: 43291 - protein, 9 aa, synthetic construct
GTQGSVRVK

SEQ ID NO: 43292 - protein, 9 aa, synthetic construct
GTQGSLRLH

SEQ ID NO: 43293 - protein, 9 aa, synthetic construct
GTQGSLRVF

SEQ ID NO: 43294 - protein, 9 aa, synthetic construct
GTQGSLKLH

SEQ ID NO: 43295 - protein, 9 aa, synthetic construct
GTQGSARLH

SEQ ID NO: 43296 - protein, 9 aa, synthetic construct
GTQGSARLF

SEQ ID NO: 43297 - protein, 9 aa, synthetic construct
GTQGSAKLY

SEQ ID NO: 43298 - protein, 9 aa, synthetic construct
GTQGSIKVK

SEQ ID NO: 43299 - protein, 9 aa, synthetic construct
GTQGSGHLK

SEQ ID NO: 43300 - protein, 9 aa, synthetic construct
GTQGSGHVR

SEQ ID NO: 43301 - protein, 9 aa, synthetic construct
GTQGSGHVK

SEQ ID NO: 43302 - protein, 9 aa, synthetic construct
GTQGSGRLR

SEQ ID NO: 43303 - protein, 9 aa, synthetic construct
GTQGSGKLR

SEQ ID NO: 43304 - protein, 9 aa, synthetic construct
GTQGSGKVK

SEQ ID NO: 43305 - protein, 9 aa, synthetic construct
GTQGVVRVR

SEQ ID NO: 43306 - protein, 9 aa, synthetic construct
GTQGVLHLR

SEQ ID NO: 43307 - protein, 9 aa, synthetic construct
GTQGVLHVF

SEQ ID NO: 43308 - protein, 9 aa, synthetic construct
GTQGVLRVK

SEQ ID NO: 43309 - protein, 9 aa, synthetic construct
GTQGVLKVR

SEQ ID NO: 43310 - protein, 9 aa, synthetic construct
GTQGVLKVK

SEQ ID NO: 43311 - protein, 9 aa, synthetic construct
GTQGVLKVF

SEQ ID NO: 43312 - protein, 9 aa, synthetic construct
GTQGVARLR

SEQ ID NO: 43313 - protein, 9 aa, synthetic construct
GTQGVARLH

SEQ ID NO: 43314 - protein, 9 aa, synthetic construct
GTQGVARLF

SEQ ID NO: 43315 - protein, 9 aa, synthetic construct
GTQGVAKVH

SEQ ID NO: 43316 - protein, 9 aa, synthetic construct
PLPGSLKLF

SEQ ID NO: 43317 - protein, 9 aa, synthetic construct
GTQGVIRLR

SEQ ID NO: 43318 - protein, 9 aa, synthetic construct
GTQGVIRLK

SEQ ID NO: 43319 - protein, 9 aa, synthetic construct
GTQGVIKLR

SEQ ID NO: 43320 - protein, 9 aa, synthetic construct
GTQGVGHLF

SEQ ID NO: 43321 - protein, 9 aa, synthetic construct
PLPGSLKVK

SEQ ID NO: 43322 - protein, 9 aa, synthetic construct
GTQGVGRLK

SEQ ID NO: 43323 - protein, 9 aa, synthetic construct
GTQGVGRVR

SEQ ID NO: 43324 - protein, 9 aa, synthetic construct
GTQGVGRVK

SEQ ID NO: 43325 - protein, 9 aa, synthetic construct
GTQGVGKLK

SEQ ID NO: 43326 - protein, 9 aa, synthetic construct
GTQGGVRVR

SEQ ID NO: 43327 - protein, 9 aa, synthetic construct
GTQGGLKLR

SEQ ID NO: 43328 - protein, 9 aa, synthetic construct
GTQGGLKVR

SEQ ID NO: 43329 - protein, 9 aa, synthetic construct
GTQGGARLH

SEQ ID NO: 43330 - protein, 9 aa, synthetic construct
PLPGSARLR

SEQ ID NO: 43331 - protein, 9 aa, synthetic construct
GTQGGIKVK

SEQ ID NO: 43332 - protein, 9 aa, synthetic construct
GTQAAVRVR

SEQ ID NO: 43333 - protein, 9 aa, synthetic construct
GTQAAVKVR

SEQ ID NO: 43334 - protein, 9 aa, synthetic construct
GTQAAVKVK

SEQ ID NO: 43335 - protein, 9 aa, synthetic construct
GTQAALHLF

SEQ ID NO: 43336 - protein, 9 aa, synthetic construct
GTQAALHVF

SEQ ID NO: 43337 - protein, 9 aa, synthetic construct
GTQAALRLY

SEQ ID NO: 43338 - protein, 9 aa, synthetic construct
GTQAAARVY

SEQ ID NO: 43339 - protein, 9 aa, synthetic construct
GTQAAARVK

SEQ ID NO: 43340 - protein, 9 aa, synthetic construct
GTQAAAKLR

SEQ ID NO: 43341 - protein, 9 aa, synthetic construct
GTQAAAKVR

SEQ ID NO: 43342 - protein, 9 aa, synthetic construct
GTQAAIKVR

SEQ ID NO: 43343 - protein, 9 aa, synthetic construct
GTQAAGRLK

SEQ ID NO: 43344 - protein, 9 aa, synthetic construct
GTQAAGKLR

SEQ ID NO: 43345 - protein, 9 aa, synthetic construct
GTQAAGKVR

SEQ ID NO: 43346 - protein, 9 aa, synthetic construct
GTQAAGKVK

SEQ ID NO: 43347 - protein, 9 aa, synthetic construct
GTQATVKLK

SEQ ID NO: 43348 - protein, 9 aa, synthetic construct
GTQATVKVY

SEQ ID NO: 43349 - protein, 9 aa, synthetic construct
GTQATVKVH

SEQ ID NO: 43350 - protein, 9 aa, synthetic construct
GTQATLHLR

SEQ ID NO: 43351 - protein, 9 aa, synthetic construct
GTQATLRLH

SEQ ID NO: 43352 - protein, 9 aa, synthetic construct
GTQATLKLF

SEQ ID NO: 43353 - protein, 9 aa, synthetic construct
GTQATLKVF

SEQ ID NO: 43354 - protein, 9 aa, synthetic construct
GTQATAKVK

SEQ ID NO: 43355 - protein, 9 aa, synthetic construct
PLNGSLRLY

SEQ ID NO: 43356 - protein, 9 aa, synthetic construct
PLPGSIRLY

SEQ ID NO: 43357 - protein, 9 aa, synthetic construct
GTQATIRLH

SEQ ID NO: 43358 - protein, 9 aa, synthetic construct
GTQATIRVR

SEQ ID NO: 43359 - protein, 9 aa, synthetic construct
PLPGSIRLH

SEQ ID NO: 43360 - protein, 9 aa, synthetic construct
PLPGSIRVY

SEQ ID NO: 43361 - protein, 9 aa, synthetic construct
PLPGSIRVK

SEQ ID NO: 43362 - protein, 9 aa, synthetic construct
GTQASLRVF

SEQ ID NO: 43363 - protein, 9 aa, synthetic construct
GTQASLKVF

SEQ ID NO: 43364 - protein, 9 aa, synthetic construct
GTQASGHVR

SEQ ID NO: 43365 - protein, 9 aa, synthetic construct
GTQASGKLR

SEQ ID NO: 43366 - protein, 9 aa, synthetic construct
GTQASGKLK

SEQ ID NO: 43367 - protein, 9 aa, synthetic construct
GTQAVVHLY

SEQ ID NO: 43368 - protein, 9 aa, synthetic construct
GTQAVVHLF

SEQ ID NO: 43369 - protein, 9 aa, synthetic construct
GTQAVVHVY

SEQ ID NO: 43370 - protein, 9 aa, synthetic construct
GTQAVVHVR

SEQ ID NO: 43371 - protein, 9 aa, synthetic construct
GTQAVVRLY

SEQ ID NO: 43372 - protein, 9 aa, synthetic construct
GTQAVVRLR

SEQ ID NO: 43373 - protein, 9 aa, synthetic construct
GTQAVVRVR

SEQ ID NO: 43374 - protein, 9 aa, synthetic construct
GTQAVVKLH

SEQ ID NO: 43375 - protein, 9 aa, synthetic construct
GTQAVVKVY

SEQ ID NO: 43376 - protein, 9 aa, synthetic construct
GTQAVLHVR

SEQ ID NO: 43377 - protein, 9 aa, synthetic construct
GTQAVLKVY

SEQ ID NO: 43378 - protein, 9 aa, synthetic construct
GTQAVAHVK

SEQ ID NO: 43379 - protein, 9 aa, synthetic construct
GTQAVARLH

SEQ ID NO: 43380 - protein, 9 aa, synthetic construct
GTQAVARLF

SEQ ID NO: 43381 - protein, 9 aa, synthetic construct
GTQAVAKLY

SEQ ID NO: 43382 - protein, 9 aa, synthetic construct
GTQAVAKLH

SEQ ID NO: 43383 - protein, 9 aa, synthetic construct
GTQAVIHVY

SEQ ID NO: 43384 - protein, 9 aa, synthetic construct
GTQAVIRLH

SEQ ID NO: 43385 - protein, 9 aa, synthetic construct
GTQAVIRVY

SEQ ID NO: 43386 - protein, 9 aa, synthetic construct
GTQAVGHLF

SEQ ID NO: 43387 - protein, 9 aa, synthetic construct
GTQAVGHVR

SEQ ID NO: 43388 - protein, 9 aa, synthetic construct
GTQAVGHVF

SEQ ID NO: 43389 - protein, 9 aa, synthetic construct
GTQAVGRLR

SEQ ID NO: 43390 - protein, 9 aa, synthetic construct
GTQAVGRVR

SEQ ID NO: 43391 - protein, 9 aa, synthetic construct
GTQAVGRVK

SEQ ID NO: 43392 - protein, 9 aa, synthetic construct
GTQAVGKVR

SEQ ID NO: 43393 - protein, 9 aa, synthetic construct
GTQAVGKVH

SEQ ID NO: 43394 - protein, 9 aa, synthetic construct
GTQAGVHVY

SEQ ID NO: 43395 - protein, 9 aa, synthetic construct
GTQAGVRLF

SEQ ID NO: 43396 - protein, 9 aa, synthetic construct
GTQAGVRVF

SEQ ID NO: 43397 - protein, 9 aa, synthetic construct
GTQAGVKLY

SEQ ID NO: 43398 - protein, 9 aa, synthetic construct
GTQAGLHVK

SEQ ID NO: 43399 - protein, 9 aa, synthetic construct
PLNGSLRLF

SEQ ID NO: 43400 - protein, 9 aa, synthetic construct
GTQAGLKLH

SEQ ID NO: 43401 - protein, 9 aa, synthetic construct
GTQAGLKVR

SEQ ID NO: 43402 - protein, 9 aa, synthetic construct
GTQAGLKVF

SEQ ID NO: 43403 - protein, 9 aa, synthetic construct
PLPGSGKLR

SEQ ID NO: 43404 - protein, 9 aa, synthetic construct
GTQAGARVY

SEQ ID NO: 43405 - protein, 9 aa, synthetic construct
GTQAGARVH

SEQ ID NO: 43406 - protein, 9 aa, synthetic construct
GTQAGARVK

SEQ ID NO: 43407 - protein, 9 aa, synthetic construct
GTQAGIRVH

SEQ ID NO: 43408 - protein, 9 aa, synthetic construct
PLPGSGKVR

SEQ ID NO: 43409 - protein, 9 aa, synthetic construct
PLPGSGKVK

SEQ ID NO: 43410 - protein, 9 aa, synthetic construct
GTQAGGRVH

SEQ ID NO: 43411 - protein, 9 aa, synthetic construct
GTPGAVRVR

SEQ ID NO: 43412 - protein, 9 aa, synthetic construct
GTPGALHLR

SEQ ID NO: 43413 - protein, 9 aa, synthetic construct
GTPGALRVR

SEQ ID NO: 43414 - protein, 9 aa, synthetic construct
GTPGALKLY

SEQ ID NO: 43415 - protein, 9 aa, synthetic construct
GTPGALKVR

SEQ ID NO: 43416 - protein, 9 aa, synthetic construct
GTPGALKVK

SEQ ID NO: 43417 - protein, 9 aa, synthetic construct
GTPGAARVK

SEQ ID NO: 43418 - protein, 9 aa, synthetic construct
GTPGAAKLR

SEQ ID NO: 43419 - protein, 9 aa, synthetic construct
PLPGVVRLY

SEQ ID NO: 43420 - protein, 9 aa, synthetic construct
GTPGAIKVK

SEQ ID NO: 43421 - protein, 9 aa, synthetic construct
GTPGAGKLK

SEQ ID NO: 43422 - protein, 9 aa, synthetic construct
PLPGVVRVY

SEQ ID NO: 43423 - protein, 9 aa, synthetic construct
GTPGTVRLK

SEQ ID NO: 43424 - protein, 9 aa, synthetic construct
GTPGTVRVK

SEQ ID NO: 43425 - protein, 9 aa, synthetic construct
GTPGTLHLR

SEQ ID NO: 43426 - protein, 9 aa, synthetic construct
GTPGTLHLF

SEQ ID NO: 43427 - protein, 9 aa, synthetic construct
PLPGVVRVF

SEQ ID NO: 43428 - protein, 9 aa, synthetic construct
GTPGTARLR

SEQ ID NO: 43429 - protein, 9 aa, synthetic construct
GTPGTARLK

SEQ ID NO: 43430 - protein, 9 aa, synthetic construct
GTPGTARVK

SEQ ID NO: 43431 - protein, 9 aa, synthetic construct
GTPGTAKLK

SEQ ID NO: 43432 - protein, 9 aa, synthetic construct
GTPGTAKVK

SEQ ID NO: 43433 - protein, 9 aa, synthetic construct
GTPGTIRLR

SEQ ID NO: 43434 - protein, 9 aa, synthetic construct
GTPGTIRLK

SEQ ID NO: 43435 - protein, 9 aa, synthetic construct
GTPGTIRVK

SEQ ID NO: 43436 - protein, 9 aa, synthetic construct
PLPGVVKVR

SEQ ID NO: 43437 - protein, 9 aa, synthetic construct
GTPGTGKLK

SEQ ID NO: 43438 - protein, 9 aa, synthetic construct
GTPGSVRLF

SEQ ID NO: 43439 - protein, 9 aa, synthetic construct
GTPGSVRVF

SEQ ID NO: 43440 - protein, 9 aa, synthetic construct
GTPGSVKLR

SEQ ID NO: 43441 - protein, 9 aa, synthetic construct
GTPGSVKLK

SEQ ID NO: 43442 - protein, 9 aa, synthetic construct
GTPGSLKVK

SEQ ID NO: 43443 - protein, 9 aa, synthetic construct
PLPGVLHVR

SEQ ID NO: 43444 - protein, 9 aa, synthetic construct
GTPGSARLR

SEQ ID NO: 43445 - protein, 9 aa, synthetic construct
GTPGSARVH

SEQ ID NO: 43446 - protein, 9 aa, synthetic construct
GTPGSAKLK

SEQ ID NO: 43447 - protein, 9 aa, synthetic construct
GTPGSIRLH

SEQ ID NO: 43448 - protein, 9 aa, synthetic construct
GTPGSIRLK

SEQ ID NO: 43449 - protein, 9 aa, synthetic construct
GTPGSIRVK

SEQ ID NO: 43450 - protein, 9 aa, synthetic construct
GTPGSIKVR

SEQ ID NO: 43451 - protein, 9 aa, synthetic construct
GTPGSIKVK

SEQ ID NO: 43452 - protein, 9 aa, synthetic construct
GTPGSGHVR

SEQ ID NO: 43453 - protein, 9 aa, synthetic construct
PLPGVLRLK

SEQ ID NO: 43454 - protein, 9 aa, synthetic construct
GTPGSGRLK

SEQ ID NO: 43455 - protein, 9 aa, synthetic construct
GTPGSGRVY

SEQ ID NO: 43456 - protein, 9 aa, synthetic construct
GTPGVVRLY

SEQ ID NO: 43457 - protein, 9 aa, synthetic construct
GTPGVVRLH

SEQ ID NO: 43458 - protein, 9 aa, synthetic construct
GTPGVLKLK

SEQ ID NO: 43459 - protein, 9 aa, synthetic construct
GTPGVLKVR

SEQ ID NO: 43460 - protein, 9 aa, synthetic construct
GTPGVLKVK

SEQ ID NO: 43461 - protein, 9 aa, synthetic construct
GTPGVARLH

SEQ ID NO: 43462 - protein, 9 aa, synthetic construct
PLPGVLKLK

SEQ ID NO: 43463 - protein, 9 aa, synthetic construct
GTPGVAKLR

SEQ ID NO: 43464 - protein, 9 aa, synthetic construct
GTPGVIRVF

SEQ ID NO: 43465 - protein, 9 aa, synthetic construct
PLPGVLKVR

SEQ ID NO: 43466 - protein, 9 aa, synthetic construct
GTPGVIKLR

SEQ ID NO: 43467 - protein, 9 aa, synthetic construct
GTPGVIKVR

SEQ ID NO: 43468 - protein, 9 aa, synthetic construct
GTPGVGHVF

SEQ ID NO: 43469 - protein, 9 aa, synthetic construct
GTPGVGRLR

SEQ ID NO: 43470 - protein, 9 aa, synthetic construct
GTPGVGKLR

SEQ ID NO: 43471 - protein, 9 aa, synthetic construct
PLNGSLKLR

SEQ ID NO: 43472 - protein, 9 aa, synthetic construct
GTPGGVKLK

SEQ ID NO: 43473 - protein, 9 aa, synthetic construct
GTPGGLKVR

SEQ ID NO: 43474 - protein, 9 aa, synthetic construct
GTPGGLKVK

SEQ ID NO: 43475 - protein, 9 aa, synthetic construct
GTPGGARLH

SEQ ID NO: 43476 - protein, 9 aa, synthetic construct
GTPGGIRVK

SEQ ID NO: 43477 - protein, 9 aa, synthetic construct
PLPGVARLR

SEQ ID NO: 43478 - protein, 9 aa, synthetic construct
GTPAAVRLK

SEQ ID NO: 43479 - protein, 9 aa, synthetic construct
GTPAAVRVR

SEQ ID NO: 43480 - protein, 9 aa, synthetic construct
GTPAAVKVR

SEQ ID NO: 43481 - protein, 9 aa, synthetic construct
GTPAAAKLK

SEQ ID NO: 43482 - protein, 9 aa, synthetic construct
GTPAAIKLR

SEQ ID NO: 43483 - protein, 9 aa, synthetic construct
GTPAAGKVR

SEQ ID NO: 43484 - protein, 9 aa, synthetic construct
GTPATVRVK

SEQ ID NO: 43485 - protein, 9 aa, synthetic construct
GTPATVKVK

SEQ ID NO: 43486 - protein, 9 aa, synthetic construct
GTPATIRVR

SEQ ID NO: 43487 - protein, 9 aa, synthetic construct
GTPATIRVK

SEQ ID NO: 43488 - protein, 9 aa, synthetic construct
PLPGVIRVR

SEQ ID NO: 43489 - protein, 9 aa, synthetic construct
GTPASVRVR

SEQ ID NO: 43490 - protein, 9 aa, synthetic construct
GTPASVRVK

SEQ ID NO: 43491 - protein, 9 aa, synthetic construct
GTPASVKLR

SEQ ID NO: 43492 - protein, 9 aa, synthetic construct
GTPASVKVR

SEQ ID NO: 43493 - protein, 9 aa, synthetic construct
GTPASLRVH

SEQ ID NO: 43494 - protein, 9 aa, synthetic construct
PLNGSLKVR

SEQ ID NO: 43495 - protein, 9 aa, synthetic construct
PLPGVIKLR

SEQ ID NO: 43496 - protein, 9 aa, synthetic construct
GTPASARVR

SEQ ID NO: 43497 - protein, 9 aa, synthetic construct
GTPASARVK

SEQ ID NO: 43498 - protein, 9 aa, synthetic construct
GTPASAKVR

SEQ ID NO: 43499 - protein, 9 aa, synthetic construct
GTPAVVRLR

SEQ ID NO: 43500 - protein, 9 aa, synthetic construct
GTPAVVRLK

SEQ ID NO: 43501 - protein, 9 aa, synthetic construct
GTPAVVRVK

SEQ ID NO: 43502 - protein, 9 aa, synthetic construct
GTPAVLHVF

SEQ ID NO: 43503 - protein, 9 aa, synthetic construct
GTPAVLKLR

SEQ ID NO: 43504 - protein, 9 aa, synthetic construct
GTPAVLKVK

SEQ ID NO: 43505 - protein, 9 aa, synthetic construct
GTPAVIHLR

SEQ ID NO: 43506 - protein, 9 aa, synthetic construct
GTPAVIRLY

SEQ ID NO: 43507 - protein, 9 aa, synthetic construct
GTPAVIRVY

SEQ ID NO: 43508 - protein, 9 aa, synthetic construct
GTPAVIRVF

SEQ ID NO: 43509 - protein, 9 aa, synthetic construct
GTPAVIKLR

SEQ ID NO: 43510 - protein, 9 aa, synthetic construct
GTPAVIKLK

SEQ ID NO: 43511 - protein, 9 aa, synthetic construct
GTPAVIKVR

SEQ ID NO: 43512 - protein, 9 aa, synthetic construct
GTPAVIKVK

SEQ ID NO: 43513 - protein, 9 aa, synthetic construct
PLPGVGRLH

SEQ ID NO: 43514 - protein, 9 aa, synthetic construct
GTPAVGRLH

SEQ ID NO: 43515 - protein, 9 aa, synthetic construct
GTPAVGRLK

SEQ ID NO: 43516 - protein, 9 aa, synthetic construct
GTPAVGKLK

SEQ ID NO: 43517 - protein, 9 aa, synthetic construct
GTPAVGKVK

SEQ ID NO: 43518 - protein, 9 aa, synthetic construct
PLPGVGRVR

SEQ ID NO: 43519 - protein, 9 aa, synthetic construct
GTPAGVKLH

SEQ ID NO: 43520 - protein, 9 aa, synthetic construct
GTPAGIHLR

SEQ ID NO: 43521 - protein, 9 aa, synthetic construct
PLPGVGKVR

SEQ ID NO: 43522 - protein, 9 aa, synthetic construct
PLPGVGKVK

SEQ ID NO: 43523 - protein, 9 aa, synthetic construct
GTPAGGRVK

SEQ ID NO: 43524 - protein, 9 aa, synthetic construct
GSNGAVKVR

SEQ ID NO: 43525 - protein, 9 aa, synthetic construct
GSNGALKLK

SEQ ID NO: 43526 - protein, 9 aa, synthetic construct
GSNGAARLR

SEQ ID NO: 43527 - protein, 9 aa, synthetic construct
GSNGAARVK

SEQ ID NO: 43528 - protein, 9 aa, synthetic construct
GSNGAIRLR

SEQ ID NO: 43529 - protein, 9 aa, synthetic construct
GSNGAIRLK

SEQ ID NO: 43530 - protein, 9 aa, synthetic construct
GSNGAIRVK

SEQ ID NO: 43531 - protein, 9 aa, synthetic construct
GSNGAGRLK

SEQ ID NO: 43532 - protein, 9 aa, synthetic construct
GSNGAGKLR

SEQ ID NO: 43533 - protein, 9 aa, synthetic construct
GSNGAGKVR

SEQ ID NO: 43534 - protein, 9 aa, synthetic construct
GSNGAGKVK

SEQ ID NO: 43535 - protein, 9 aa, synthetic construct
GSNGTVRLK

SEQ ID NO: 43536 - protein, 9 aa, synthetic construct
GSNGTVRLF

SEQ ID NO: 43537 - protein, 9 aa, synthetic construct
GSNGTVRVK

SEQ ID NO: 43538 - protein, 9 aa, synthetic construct
GSNGTVKVR

SEQ ID NO: 43539 - protein, 9 aa, synthetic construct
GSNGTLRVR

SEQ ID NO: 43540 - protein, 9 aa, synthetic construct
PLPGGVKLR

SEQ ID NO: 43541 - protein, 9 aa, synthetic construct
GSNGTARLK

SEQ ID NO: 43542 - protein, 9 aa, synthetic construct
GSNGTARVK

SEQ ID NO: 43543 - protein, 9 aa, synthetic construct
GSNGTAKVR

SEQ ID NO: 43544 - protein, 9 aa, synthetic construct
GSNGTIRLK

SEQ ID NO: 43545 - protein, 9 aa, synthetic construct
GSNGTIRVK

SEQ ID NO: 43546 - protein, 9 aa, synthetic construct
PLPGGVKVR

SEQ ID NO: 43547 - protein, 9 aa, synthetic construct
GSNGTGKVR

SEQ ID NO: 43548 - protein, 9 aa, synthetic construct
GSNGSVRVK

SEQ ID NO: 43549 - protein, 9 aa, synthetic construct
GSNGSVKVR

SEQ ID NO: 43550 - protein, 9 aa, synthetic construct
GSNGSLRLK

SEQ ID NO: 43551 - protein, 9 aa, synthetic construct
GSNGSLRVR

SEQ ID NO: 43552 - protein, 9 aa, synthetic construct
GSNGSLKVK

SEQ ID NO: 43553 - protein, 9 aa, synthetic construct
GSNGSAHLR

SEQ ID NO: 43554 - protein, 9 aa, synthetic construct
GSNGSARLF

SEQ ID NO: 43555 - protein, 9 aa, synthetic construct
GSNGSAKVK

SEQ ID NO: 43556 - protein, 9 aa, synthetic construct
GSNGSIHLF

SEQ ID NO: 43557 - protein, 9 aa, synthetic construct
GSNGSIKVR

SEQ ID NO: 43558 - protein, 9 aa, synthetic construct
GSNGSIKVK

SEQ ID NO: 43559 - protein, 9 aa, synthetic construct
GSNGSGRLK

SEQ ID NO: 43560 - protein, 9 aa, synthetic construct
GSNGVVRLK

SEQ ID NO: 43561 - protein, 9 aa, synthetic construct
GSNGVVRVR

SEQ ID NO: 43562 - protein, 9 aa, synthetic construct
GSNGVVKLR

SEQ ID NO: 43563 - protein, 9 aa, synthetic construct
GSNGVVKVR

SEQ ID NO: 43564 - protein, 9 aa, synthetic construct
GSNGVLRVY

SEQ ID NO: 43565 - protein, 9 aa, synthetic construct
GSNGVLRVR

SEQ ID NO: 43566 - protein, 9 aa, synthetic construct
GSNGVLRVH

SEQ ID NO: 43567 - protein, 9 aa, synthetic construct
GSNGVLKVK

SEQ ID NO: 43568 - protein, 9 aa, synthetic construct
GSNGVIRLK

SEQ ID NO: 43569 - protein, 9 aa, synthetic construct
GSNGVIRVR

SEQ ID NO: 43570 - protein, 9 aa, synthetic construct
GSNGVIRVF

SEQ ID NO: 43571 - protein, 9 aa, synthetic construct
PLPGGLKVR

SEQ ID NO: 43572 - protein, 9 aa, synthetic construct
GSNGVIKLR

SEQ ID NO: 43573 - protein, 9 aa, synthetic construct
GSNGVIKVR

SEQ ID NO: 43574 - protein, 9 aa, synthetic construct
GSNGVIKVF

SEQ ID NO: 43575 - protein, 9 aa, synthetic construct
GSNGVGHLF

SEQ ID NO: 43576 - protein, 9 aa, synthetic construct
GSNGVGHVR

SEQ ID NO: 43577 - protein, 9 aa, synthetic construct
GSNGVGRLH

SEQ ID NO: 43578 - protein, 9 aa, synthetic construct
GSNGVGRVR

SEQ ID NO: 43579 - protein, 9 aa, synthetic construct
GSNGVGRVK

SEQ ID NO: 43580 - protein, 9 aa, synthetic construct
GSNGVGKLK

SEQ ID NO: 43581 - protein, 9 aa, synthetic construct
GSNGVGKVK

SEQ ID NO: 43582 - protein, 9 aa, synthetic construct
GSNGGVRLR

SEQ ID NO: 43583 - protein, 9 aa, synthetic construct
GSNGGVRVR

SEQ ID NO: 43584 - protein, 9 aa, synthetic construct
GSNGGVKLR

SEQ ID NO: 43585 - protein, 9 aa, synthetic construct
GSNGGVKLK

SEQ ID NO: 43586 - protein, 9 aa, synthetic construct
GSNGGVKVR

SEQ ID NO: 43587 - protein, 9 aa, synthetic construct
GSNGGLRVH

SEQ ID NO: 43588 - protein, 9 aa, synthetic construct
GSNGGLKLK

SEQ ID NO: 43589 - protein, 9 aa, synthetic construct
GSNGGLKVR

SEQ ID NO: 43590 - protein, 9 aa, synthetic construct
GSNGGAKLK

SEQ ID NO: 43591 - protein, 9 aa, synthetic construct
GSNGGIRLR

SEQ ID NO: 43592 - protein, 9 aa, synthetic construct
GSNGGIRLK

SEQ ID NO: 43593 - protein, 9 aa, synthetic construct
GSNGGIRVK

SEQ ID NO: 43594 - protein, 9 aa, synthetic construct
GSNGGIRVF

SEQ ID NO: 43595 - protein, 9 aa, synthetic construct
GSNGGIKLR

SEQ ID NO: 43596 - protein, 9 aa, synthetic construct
GSNGGIKLK

SEQ ID NO: 43597 - protein, 9 aa, synthetic construct
GSNGGIKVR

SEQ ID NO: 43598 - protein, 9 aa, synthetic construct
GSNGGGRLR

SEQ ID NO: 43599 - protein, 9 aa, synthetic construct
GSNGGGRLK

SEQ ID NO: 43600 - protein, 9 aa, synthetic construct
GSNGGGKLK

SEQ ID NO: 43601 - protein, 9 aa, synthetic construct
GSNAALRLK

SEQ ID NO: 43602 - protein, 9 aa, synthetic construct
GSNAALRLF

SEQ ID NO: 43603 - protein, 9 aa, synthetic construct
GSNAALRVR

SEQ ID NO: 43604 - protein, 9 aa, synthetic construct
GSNAALKVK

SEQ ID NO: 43605 - protein, 9 aa, synthetic construct
GSNAAARVK

SEQ ID NO: 43606 - protein, 9 aa, synthetic construct
GSNAAAKLR

SEQ ID NO: 43607 - protein, 9 aa, synthetic construct
GSNAAAKLK

SEQ ID NO: 43608 - protein, 9 aa, synthetic construct
GSNAAIRVR

SEQ ID NO: 43609 - protein, 9 aa, synthetic construct
GSNAAIKLR

SEQ ID NO: 43610 - protein, 9 aa, synthetic construct
GSNAAIKVK

SEQ ID NO: 43611 - protein, 9 aa, synthetic construct
GSNAAGRLK

SEQ ID NO: 43612 - protein, 9 aa, synthetic construct
GSNAAGRVR

SEQ ID NO: 43613 - protein, 9 aa, synthetic construct
GSNAAGKLR

SEQ ID NO: 43614 - protein, 9 aa, synthetic construct
GSNAAGKLK

SEQ ID NO: 43615 - protein, 9 aa, synthetic construct
GSNATVRLR

SEQ ID NO: 43616 - protein, 9 aa, synthetic construct
GSNATVKVK

SEQ ID NO: 43617 - protein, 9 aa, synthetic construct
GSNATLHLY

SEQ ID NO: 43618 - protein, 9 aa, synthetic construct
GSNATLRLH

SEQ ID NO: 43619 - protein, 9 aa, synthetic construct
GSNATLRLK

SEQ ID NO: 43620 - protein, 9 aa, synthetic construct
GSNATLRLF

SEQ ID NO: 43621 - protein, 9 aa, synthetic construct
GSNATLKLR

SEQ ID NO: 43622 - protein, 9 aa, synthetic construct
GSNATLKLK

SEQ ID NO: 43623 - protein, 9 aa, synthetic construct
GSNATLKVH

SEQ ID NO: 43624 - protein, 9 aa, synthetic construct
GSNATLKVF

SEQ ID NO: 43625 - protein, 9 aa, synthetic construct
GSNATARLK

SEQ ID NO: 43626 - protein, 9 aa, synthetic construct
GSNATAKLK

SEQ ID NO: 43627 - protein, 9 aa, synthetic construct
GSNATAKVR

SEQ ID NO: 43628 - protein, 9 aa, synthetic construct
GSNATIHLY

SEQ ID NO: 43629 - protein, 9 aa, synthetic construct
GSNATIHLR

SEQ ID NO: 43630 - protein, 9 aa, synthetic construct
GSNATIRLY

SEQ ID NO: 43631 - protein, 9 aa, synthetic construct
GSNATIRLH

SEQ ID NO: 43632 - protein, 9 aa, synthetic construct
GSNATIRVR

SEQ ID NO: 43633 - protein, 9 aa, synthetic construct
GSNATIRVK

SEQ ID NO: 43634 - protein, 9 aa, synthetic construct
GSNATIKVK

SEQ ID NO: 43635 - protein, 9 aa, synthetic construct
GSNATGRLK

SEQ ID NO: 43636 - protein, 9 aa, synthetic construct
GSNASVKLR

SEQ ID NO: 43637 - protein, 9 aa, synthetic construct
GSNASLRVH

SEQ ID NO: 43638 - protein, 9 aa, synthetic construct
GSNASLKVK

SEQ ID NO: 43639 - protein, 9 aa, synthetic construct
GSNASARLF

SEQ ID NO: 43640 - protein, 9 aa, synthetic construct
GSNASARVH

SEQ ID NO: 43641 - protein, 9 aa, synthetic construct
GSNASAKVR

SEQ ID NO: 43642 - protein, 9 aa, synthetic construct
PLPGGIKVK

SEQ ID NO: 43643 - protein, 9 aa, synthetic construct
GSNASGRLK

SEQ ID NO: 43644 - protein, 9 aa, synthetic construct
GSNASGRVK

SEQ ID NO: 43645 - protein, 9 aa, synthetic construct
GSNAVVHLK

SEQ ID NO: 43646 - protein, 9 aa, synthetic construct
GSNAVVRVR

SEQ ID NO: 43647 - protein, 9 aa, synthetic construct
GSNAVVKVR

SEQ ID NO: 43648 - protein, 9 aa, synthetic construct
GSNAVLHVY

SEQ ID NO: 43649 - protein, 9 aa, synthetic construct
GSNAVLHVH

SEQ ID NO: 43650 - protein, 9 aa, synthetic construct
GSNAVLRVY

SEQ ID NO: 43651 - protein, 9 aa, synthetic construct
GSNAVLRVF

SEQ ID NO: 43652 - protein, 9 aa, synthetic construct
GSNAVLKLR

SEQ ID NO: 43653 - protein, 9 aa, synthetic construct
GSNAVLKLF

SEQ ID NO: 43654 - protein, 9 aa, synthetic construct
GSNAVLKVR

SEQ ID NO: 43655 - protein, 9 aa, synthetic construct
GSNAVLKVK

SEQ ID NO: 43656 - protein, 9 aa, synthetic construct
GSNAVARLR

SEQ ID NO: 43657 - protein, 9 aa, synthetic construct
GSNAVIHLY

SEQ ID NO: 43658 - protein, 9 aa, synthetic construct
GSNAVIHLF

SEQ ID NO: 43659 - protein, 9 aa, synthetic construct
GSNAVIRVY

SEQ ID NO: 43660 - protein, 9 aa, synthetic construct
GSNAVIRVR

SEQ ID NO: 43661 - protein, 9 aa, synthetic construct
GSNAVIRVK

SEQ ID NO: 43662 - protein, 9 aa, synthetic construct
GSNAVIRVF

SEQ ID NO: 43663 - protein, 9 aa, synthetic construct
PLPGGGRLR

SEQ ID NO: 43664 - protein, 9 aa, synthetic construct
GSNAVIKLY

SEQ ID NO: 43665 - protein, 9 aa, synthetic construct
GSNAVIKVR

SEQ ID NO: 43666 - protein, 9 aa, synthetic construct
GSNAVIKVK

SEQ ID NO: 43667 - protein, 9 aa, synthetic construct
GSNAVIKVF

SEQ ID NO: 43668 - protein, 9 aa, synthetic construct
GSNAVGHLF

SEQ ID NO: 43669 - protein, 9 aa, synthetic construct
GSNAVGHVR

SEQ ID NO: 43670 - protein, 9 aa, synthetic construct
GSNAVGRLH

SEQ ID NO: 43671 - protein, 9 aa, synthetic construct
GSNAVGRVR

SEQ ID NO: 43672 - protein, 9 aa, synthetic construct
GSNAVGRVK

SEQ ID NO: 43673 - protein, 9 aa, synthetic construct
GSNAVGKLK

SEQ ID NO: 43674 - protein, 9 aa, synthetic construct
GSNAVGKVK

SEQ ID NO: 43675 - protein, 9 aa, synthetic construct
GSNAGVHLR

SEQ ID NO: 43676 - protein, 9 aa, synthetic construct
GSNAGVRVK

SEQ ID NO: 43677 - protein, 9 aa, synthetic construct
GSNAGLHVY

SEQ ID NO: 43678 - protein, 9 aa, synthetic construct
GSNAGLKLH

SEQ ID NO: 43679 - protein, 9 aa, synthetic construct
PLPGGGKLR

SEQ ID NO: 43680 - protein, 9 aa, synthetic construct
GSNAGAHLR

SEQ ID NO: 43681 - protein, 9 aa, synthetic construct
GSNAGARLK

SEQ ID NO: 43682 - protein, 9 aa, synthetic construct
PLPGGGKLK

SEQ ID NO: 43683 - protein, 9 aa, synthetic construct
GSNAGIHLF

SEQ ID NO: 43684 - protein, 9 aa, synthetic construct
GSNAGIRLF

SEQ ID NO: 43685 - protein, 9 aa, synthetic construct
GSNAGIRVK

SEQ ID NO: 43686 - protein, 9 aa, synthetic construct
GSNAGIKLK

SEQ ID NO: 43687 - protein, 9 aa, synthetic construct
GSNAGGHLF

SEQ ID NO: 43688 - protein, 9 aa, synthetic construct
GSNAGGRLR

SEQ ID NO: 43689 - protein, 9 aa, synthetic construct
GSNAGGRLK

SEQ ID NO: 43690 - protein, 9 aa, synthetic construct
GSNAGGRVH

SEQ ID NO: 43691 - protein, 9 aa, synthetic construct
GSNAGGKLK

SEQ ID NO: 43692 - protein, 9 aa, synthetic construct
GSNAGGKVR

SEQ ID NO: 43693 - protein, 9 aa, synthetic construct
GSQGAVKVR

SEQ ID NO: 43694 - protein, 9 aa, synthetic construct
GSQGALRLK

SEQ ID NO: 43695 - protein, 9 aa, synthetic construct
GSQGALKVK

SEQ ID NO: 43696 - protein, 9 aa, synthetic construct
GSQGAARLK

SEQ ID NO: 43697 - protein, 9 aa, synthetic construct
PLNGSARVR

SEQ ID NO: 43698 - protein, 9 aa, synthetic construct
GSQGAIRLK

SEQ ID NO: 43699 - protein, 9 aa, synthetic construct
GSQGAIRVK

SEQ ID NO: 43700 - protein, 9 aa, synthetic construct
PLPAAVRLR

SEQ ID NO: 43701 - protein, 9 aa, synthetic construct
GSQGAIKLK

SEQ ID NO: 43702 - protein, 9 aa, synthetic construct
GSQGAGKLK

SEQ ID NO: 43703 - protein, 9 aa, synthetic construct
PLPAAVRVR

SEQ ID NO: 43704 - protein, 9 aa, synthetic construct
GSQGTVRVR

SEQ ID NO: 43705 - protein, 9 aa, synthetic construct
GSQGTVKVR

SEQ ID NO: 43706 - protein, 9 aa, synthetic construct
GSQGTVKVK

SEQ ID NO: 43707 - protein, 9 aa, synthetic construct
GSQGTLRLH

SEQ ID NO: 43708 - protein, 9 aa, synthetic construct
GSQGTLRVR

SEQ ID NO: 43709 - protein, 9 aa, synthetic construct
GSQGTLRVH

SEQ ID NO: 43710 - protein, 9 aa, synthetic construct
GSQGTLKVR

SEQ ID NO: 43711 - protein, 9 aa, synthetic construct
GSQGTLKVK

SEQ ID NO: 43712 - protein, 9 aa, synthetic construct
GSQGTAKVR

SEQ ID NO: 43713 - protein, 9 aa, synthetic construct
GSQGTIRVY

SEQ ID NO: 43714 - protein, 9 aa, synthetic construct
GSQGTIRVK

SEQ ID NO: 43715 - protein, 9 aa, synthetic construct
PLPAAVKVR

SEQ ID NO: 43716 - protein, 9 aa, synthetic construct
GSQGTIKLK

SEQ ID NO: 43717 - protein, 9 aa, synthetic construct
GSQGTIKVR

SEQ ID NO: 43718 - protein, 9 aa, synthetic construct
GSQGTGHVK

SEQ ID NO: 43719 - protein, 9 aa, synthetic construct
GSQGTGRLR

SEQ ID NO: 43720 - protein, 9 aa, synthetic construct
GSQGTGRLK

SEQ ID NO: 43721 - protein, 9 aa, synthetic construct
GSQGTGKVR

SEQ ID NO: 43722 - protein, 9 aa, synthetic construct
GSQGTGKVK

SEQ ID NO: 43723 - protein, 9 aa, synthetic construct
GSQGSVRLH

SEQ ID NO: 43724 - protein, 9 aa, synthetic construct
GSQGSVRVK

SEQ ID NO: 43725 - protein, 9 aa, synthetic construct
GSQGSLRLF

SEQ ID NO: 43726 - protein, 9 aa, synthetic construct
GSQGSLRVY

SEQ ID NO: 43727 - protein, 9 aa, synthetic construct
GSQGSLKLY

SEQ ID NO: 43728 - protein, 9 aa, synthetic construct
GSQGSLKVY

SEQ ID NO: 43729 - protein, 9 aa, synthetic construct
GSQGSLKVR

SEQ ID NO: 43730 - protein, 9 aa, synthetic construct
GSQGSLKVF

SEQ ID NO: 43731 - protein, 9 aa, synthetic construct
GSQGSARLH

SEQ ID NO: 43732 - protein, 9 aa, synthetic construct
GSQGSARLF

SEQ ID NO: 43733 - protein, 9 aa, synthetic construct
GSQGSARVH

SEQ ID NO: 43734 - protein, 9 aa, synthetic construct
GSQGSAKVR

SEQ ID NO: 43735 - protein, 9 aa, synthetic construct
GSQGSIKVK

SEQ ID NO: 43736 - protein, 9 aa, synthetic construct
GSQGSGHVK

SEQ ID NO: 43737 - protein, 9 aa, synthetic construct
GSQGSGRLR

SEQ ID NO: 43738 - protein, 9 aa, synthetic construct
GSQGSGRLH

SEQ ID NO: 43739 - protein, 9 aa, synthetic construct
GSQGSGRLK

SEQ ID NO: 43740 - protein, 9 aa, synthetic construct
GSQGSGKLR

SEQ ID NO: 43741 - protein, 9 aa, synthetic construct
GSQGSGKLK

SEQ ID NO: 43742 - protein, 9 aa, synthetic construct
GSQGSGKVR

SEQ ID NO: 43743 - protein, 9 aa, synthetic construct
GSQGSGKVK

SEQ ID NO: 43744 - protein, 9 aa, synthetic construct
GSQGVVKLK

SEQ ID NO: 43745 - protein, 9 aa, synthetic construct
GSQGVVKVR

SEQ ID NO: 43746 - protein, 9 aa, synthetic construct
PLPAALRVK

SEQ ID NO: 43747 - protein, 9 aa, synthetic construct
GSQGVLHVF

SEQ ID NO: 43748 - protein, 9 aa, synthetic construct
GSQGVLKLK

SEQ ID NO: 43749 - protein, 9 aa, synthetic construct
GSQGVARLF

SEQ ID NO: 43750 - protein, 9 aa, synthetic construct
GSQGVARVR

SEQ ID NO: 43751 - protein, 9 aa, synthetic construct
GSQGVAKVK

SEQ ID NO: 43752 - protein, 9 aa, synthetic construct
PLPAALKLF

SEQ ID NO: 43753 - protein, 9 aa, synthetic construct
GSQGVIKLR

SEQ ID NO: 43754 - protein, 9 aa, synthetic construct
GSQGVIKVK

SEQ ID NO: 43755 - protein, 9 aa, synthetic construct
GSQGVGHLF

SEQ ID NO: 43756 - protein, 9 aa, synthetic construct
GSQGVGRLK

SEQ ID NO: 43757 - protein, 9 aa, synthetic construct
GSQGVGRVR

SEQ ID NO: 43758 - protein, 9 aa, synthetic construct
GSQGVGRVH

SEQ ID NO: 43759 - protein, 9 aa, synthetic construct
GSQGVGRVK

SEQ ID NO: 43760 - protein, 9 aa, synthetic construct
GSQGVGKVR

SEQ ID NO: 43761 - protein, 9 aa, synthetic construct
GSQGVGKVK

SEQ ID NO: 43762 - protein, 9 aa, synthetic construct
GSQGGVRVR

SEQ ID NO: 43763 - protein, 9 aa, synthetic construct
GSQGGVRVK

SEQ ID NO: 43764 - protein, 9 aa, synthetic construct
GSQGGVKVR

SEQ ID NO: 43765 - protein, 9 aa, synthetic construct
GSQGGLRVR

SEQ ID NO: 43766 - protein, 9 aa, synthetic construct
GSQGGLKVR

SEQ ID NO: 43767 - protein, 9 aa, synthetic construct
GSQGGAHLR

SEQ ID NO: 43768 - protein, 9 aa, synthetic construct
GSQGGARLH

SEQ ID NO: 43769 - protein, 9 aa, synthetic construct
GSQGGARVR

SEQ ID NO: 43770 - protein, 9 aa, synthetic construct
GSQGGARVK

SEQ ID NO: 43771 - protein, 9 aa, synthetic construct
GSQGGAKVK

SEQ ID NO: 43772 - protein, 9 aa, synthetic construct
GSQGGIKVK

SEQ ID NO: 43773 - protein, 9 aa, synthetic construct
GSQGGGRLR

SEQ ID NO: 43774 - protein, 9 aa, synthetic construct
GSQGGGRLK

SEQ ID NO: 43775 - protein, 9 aa, synthetic construct
GSQGGGKLR

SEQ ID NO: 43776 - protein, 9 aa, synthetic construct
GSQAAVRVK

SEQ ID NO: 43777 - protein, 9 aa, synthetic construct
GSQAAVKVR

SEQ ID NO: 43778 - protein, 9 aa, synthetic construct
PLPAAARVK

SEQ ID NO: 43779 - protein, 9 aa, synthetic construct
GSQAALRLF

SEQ ID NO: 43780 - protein, 9 aa, synthetic construct
PLPAAAKLK

SEQ ID NO: 43781 - protein, 9 aa, synthetic construct
GSQAAIRVY

SEQ ID NO: 43782 - protein, 9 aa, synthetic construct
GSQAAIKLR

SEQ ID NO: 43783 - protein, 9 aa, synthetic construct
GSQAAGRLK

SEQ ID NO: 43784 - protein, 9 aa, synthetic construct
GSQAAGRVR

SEQ ID NO: 43785 - protein, 9 aa, synthetic construct
GSQAAGKVR

SEQ ID NO: 43786 - protein, 9 aa, synthetic construct
GSQATVHLF

SEQ ID NO: 43787 - protein, 9 aa, synthetic construct
GSQATVHVK

SEQ ID NO: 43788 - protein, 9 aa, synthetic construct
GSQATVRLY

SEQ ID NO: 43789 - protein, 9 aa, synthetic construct
GSQATVRLF

SEQ ID NO: 43790 - protein, 9 aa, synthetic construct
GSQATVRVK

SEQ ID NO: 43791 - protein, 9 aa, synthetic construct
GSQATVKVH

SEQ ID NO: 43792 - protein, 9 aa, synthetic construct
GSQATVKVF

SEQ ID NO: 43793 - protein, 9 aa, synthetic construct
GSQATARVH

SEQ ID NO: 43794 - protein, 9 aa, synthetic construct
GSQATAKVR

SEQ ID NO: 43795 - protein, 9 aa, synthetic construct
GSQATAKVK

SEQ ID NO: 43796 - protein, 9 aa, synthetic construct
GSQATIRVR

SEQ ID NO: 43797 - protein, 9 aa, synthetic construct
GSQATIRVH

SEQ ID NO: 43798 - protein, 9 aa, synthetic construct
GSQATIRVF

SEQ ID NO: 43799 - protein, 9 aa, synthetic construct
GSQATIKLY

SEQ ID NO: 43800 - protein, 9 aa, synthetic construct
GSQATIKLH

SEQ ID NO: 43801 - protein, 9 aa, synthetic construct
GSQATIKLF

SEQ ID NO: 43802 - protein, 9 aa, synthetic construct
PLPAAIRVR

SEQ ID NO: 43803 - protein, 9 aa, synthetic construct
GSQASVKLR

SEQ ID NO: 43804 - protein, 9 aa, synthetic construct
GSQASVKVR

SEQ ID NO: 43805 - protein, 9 aa, synthetic construct
PLPAAIRVK

SEQ ID NO: 43806 - protein, 9 aa, synthetic construct
PLPAAIKLR

SEQ ID NO: 43807 - protein, 9 aa, synthetic construct
GSQASAHLR

SEQ ID NO: 43808 - protein, 9 aa, synthetic construct
GSQASIHLR

SEQ ID NO: 43809 - protein, 9 aa, synthetic construct
GSQASIRLK

SEQ ID NO: 43810 - protein, 9 aa, synthetic construct
GSQASIKLK

SEQ ID NO: 43811 - protein, 9 aa, synthetic construct
GSQASIKVF

SEQ ID NO: 43812 - protein, 9 aa, synthetic construct
GSQASGKLR

SEQ ID NO: 43813 - protein, 9 aa, synthetic construct
GSQAVVHLY

SEQ ID NO: 43814 - protein, 9 aa, synthetic construct
GSQAVVRVR

SEQ ID NO: 43815 - protein, 9 aa, synthetic construct
GSQAVVKLH

SEQ ID NO: 43816 - protein, 9 aa, synthetic construct
GSQAVVKLF

SEQ ID NO: 43817 - protein, 9 aa, synthetic construct
GSQAVVKVK

SEQ ID NO: 43818 - protein, 9 aa, synthetic construct
GSQAVLHVR

SEQ ID NO: 43819 - protein, 9 aa, synthetic construct
GSQAVLRVF

SEQ ID NO: 43820 - protein, 9 aa, synthetic construct
GSQAVLKLK

SEQ ID NO: 43821 - protein, 9 aa, synthetic construct
GSQAVLKVK

SEQ ID NO: 43822 - protein, 9 aa, synthetic construct
GSQAVAHVR

SEQ ID NO: 43823 - protein, 9 aa, synthetic construct
GSQAVARLF

SEQ ID NO: 43824 - protein, 9 aa, synthetic construct
GSQAVAKLH

SEQ ID NO: 43825 - protein, 9 aa, synthetic construct
GSQAVAKVK

SEQ ID NO: 43826 - protein, 9 aa, synthetic construct
GSQAVIHVY

SEQ ID NO: 43827 - protein, 9 aa, synthetic construct
GSQAVIHVF

SEQ ID NO: 43828 - protein, 9 aa, synthetic construct
PLNGSAKVK

SEQ ID NO: 43829 - protein, 9 aa, synthetic construct
GSQAVIKVY

SEQ ID NO: 43830 - protein, 9 aa, synthetic construct
GSQAVIKVR

SEQ ID NO: 43831 - protein, 9 aa, synthetic construct
GSQAVIKVK

SEQ ID NO: 43832 - protein, 9 aa, synthetic construct
GSQAVGRLR

SEQ ID NO: 43833 - protein, 9 aa, synthetic construct
GSQAVGRVR

SEQ ID NO: 43834 - protein, 9 aa, synthetic construct
GSQAVGRVK

SEQ ID NO: 43835 - protein, 9 aa, synthetic construct
GSQAGVRVK

SEQ ID NO: 43836 - protein, 9 aa, synthetic construct
GSQAGVKVR

SEQ ID NO: 43837 - protein, 9 aa, synthetic construct
GSQAGARLR

SEQ ID NO: 43838 - protein, 9 aa, synthetic construct
PLPAAGKVR

SEQ ID NO: 43839 - protein, 9 aa, synthetic construct
GSQAGIKLR

SEQ ID NO: 43840 - protein, 9 aa, synthetic construct
GSQAGIKVK

SEQ ID NO: 43841 - protein, 9 aa, synthetic construct
PLPAAGKVK

SEQ ID NO: 43842 - protein, 9 aa, synthetic construct
GSPGAVHLF

SEQ ID NO: 43843 - protein, 9 aa, synthetic construct
GSPGAVRVR

SEQ ID NO: 43844 - protein, 9 aa, synthetic construct
GSPGAVKLR

SEQ ID NO: 43845 - protein, 9 aa, synthetic construct
GSPGAVKVR

SEQ ID NO: 43846 - protein, 9 aa, synthetic construct
GSPGALRLH

SEQ ID NO: 43847 - protein, 9 aa, synthetic construct
GSPGALRLF

SEQ ID NO: 43848 - protein, 9 aa, synthetic construct
GSPGALKVK

SEQ ID NO: 43849 - protein, 9 aa, synthetic construct
GSPGAARVK

SEQ ID NO: 43850 - protein, 9 aa, synthetic construct
GSPGAAKLK

SEQ ID NO: 43851 - protein, 9 aa, synthetic construct
GSPGAIRLR

SEQ ID NO: 43852 - protein, 9 aa, synthetic construct
GSPGAIKLK

SEQ ID NO: 43853 - protein, 9 aa, synthetic construct
GSPGAIKVY

SEQ ID NO: 43854 - protein, 9 aa, synthetic construct
GSPGAIKVK

SEQ ID NO: 43855 - protein, 9 aa, synthetic construct
GSPGAGKLR

SEQ ID NO: 43856 - protein, 9 aa, synthetic construct
GSPGAGKLK

SEQ ID NO: 43857 - protein, 9 aa, synthetic construct
GSPGTVRLR

SEQ ID NO: 43858 - protein, 9 aa, synthetic construct
GSPGTVRVR

SEQ ID NO: 43859 - protein, 9 aa, synthetic construct
GSPGTLRLH

SEQ ID NO: 43860 - protein, 9 aa, synthetic construct
GSPGTLRVR

SEQ ID NO: 43861 - protein, 9 aa, synthetic construct
GSPGTLKLK

SEQ ID NO: 43862 - protein, 9 aa, synthetic construct
GSPGTAKLK

SEQ ID NO: 43863 - protein, 9 aa, synthetic construct
GSPGTAKVR

SEQ ID NO: 43864 - protein, 9 aa, synthetic construct
GSPGTIRLK

SEQ ID NO: 43865 - protein, 9 aa, synthetic construct
GSPGTIRVR

SEQ ID NO: 43866 - protein, 9 aa, synthetic construct
PLPATVKVR

SEQ ID NO: 43867 - protein, 9 aa, synthetic construct
GSPGTGKLR

SEQ ID NO: 43868 - protein, 9 aa, synthetic construct
GSPGTGKLK

SEQ ID NO: 43869 - protein, 9 aa, synthetic construct
GSPGTGKVK

SEQ ID NO: 43870 - protein, 9 aa, synthetic construct
GSPGSVRLF

SEQ ID NO: 43871 - protein, 9 aa, synthetic construct
GSPGSVRVH

SEQ ID NO: 43872 - protein, 9 aa, synthetic construct
GSPGSVRVF

SEQ ID NO: 43873 - protein, 9 aa, synthetic construct
GSPGSVKVR

SEQ ID NO: 43874 - protein, 9 aa, synthetic construct
GSPGSLRVH

SEQ ID NO: 43875 - protein, 9 aa, synthetic construct
GSPGSLKLK

SEQ ID NO: 43876 - protein, 9 aa, synthetic construct
GSPGSLKVH

SEQ ID NO: 43877 - protein, 9 aa, synthetic construct
GSPGSIKVK

SEQ ID NO: 43878 - protein, 9 aa, synthetic construct
GSPGSGHVR

SEQ ID NO: 43879 - protein, 9 aa, synthetic construct
GSPGSGHVK

SEQ ID NO: 43880 - protein, 9 aa, synthetic construct
GSPGSGRVK

SEQ ID NO: 43881 - protein, 9 aa, synthetic construct
GSPGSGKLR

SEQ ID NO: 43882 - protein, 9 aa, synthetic construct
GSPGSGKVK

SEQ ID NO: 43883 - protein, 9 aa, synthetic construct
PLPATLRVR

SEQ ID NO: 43884 - protein, 9 aa, synthetic construct
GSPGVVRLY

SEQ ID NO: 43885 - protein, 9 aa, synthetic construct
GSPGVVRLR

SEQ ID NO: 43886 - protein, 9 aa, synthetic construct
GSPGVVRLK

SEQ ID NO: 43887 - protein, 9 aa, synthetic construct
GSPGVVKLR

SEQ ID NO: 43888 - protein, 9 aa, synthetic construct
PLPATLRVK

SEQ ID NO: 43889 - protein, 9 aa, synthetic construct
GSPGVLHVR

SEQ ID NO: 43890 - protein, 9 aa, synthetic construct
GSPGVLRLY

SEQ ID NO: 43891 - protein, 9 aa, synthetic construct
GSPGVLRVR

SEQ ID NO: 43892 - protein, 9 aa, synthetic construct
GSPGVLRVF

SEQ ID NO: 43893 - protein, 9 aa, synthetic construct
GSPGVLKVR

SEQ ID NO: 43894 - protein, 9 aa, synthetic construct
GSPGVLKVK

SEQ ID NO: 43895 - protein, 9 aa, synthetic construct
GSPGVIRLY

SEQ ID NO: 43896 - protein, 9 aa, synthetic construct
GSPGVIRLH

SEQ ID NO: 43897 - protein, 9 aa, synthetic construct
GSPGVIRLK

SEQ ID NO: 43898 - protein, 9 aa, synthetic construct
GSPGVIRLF

SEQ ID NO: 43899 - protein, 9 aa, synthetic construct
GSPGVIRVR

SEQ ID NO: 43900 - protein, 9 aa, synthetic construct
PLPATLKVR

SEQ ID NO: 43901 - protein, 9 aa, synthetic construct
GSPGVIKLR

SEQ ID NO: 43902 - protein, 9 aa, synthetic construct
GSPGVIKLK

SEQ ID NO: 43903 - protein, 9 aa, synthetic construct
GSPGVGRLR

SEQ ID NO: 43904 - protein, 9 aa, synthetic construct
GSPGVGKVR

SEQ ID NO: 43905 - protein, 9 aa, synthetic construct
GSPGGLRVY

SEQ ID NO: 43906 - protein, 9 aa, synthetic construct
GSPGGLRVR

SEQ ID NO: 43907 - protein, 9 aa, synthetic construct
GSPGGIRLR

SEQ ID NO: 43908 - protein, 9 aa, synthetic construct
GSPGGIKVK

SEQ ID NO: 43909 - protein, 9 aa, synthetic construct
GSPGGGHLK

SEQ ID NO: 43910 - protein, 9 aa, synthetic construct
GSPGGGRVK

SEQ ID NO: 43911 - protein, 9 aa, synthetic construct
GSPGGGKVR

SEQ ID NO: 43912 - protein, 9 aa, synthetic construct
GSPAALHLR

SEQ ID NO: 43913 - protein, 9 aa, synthetic construct
GSPAALRLF

SEQ ID NO: 43914 - protein, 9 aa, synthetic construct
GSPAALKLK

SEQ ID NO: 43915 - protein, 9 aa, synthetic construct
GSPAALKVK

SEQ ID NO: 43916 - protein, 9 aa, synthetic construct
PLPATAKLK

SEQ ID NO: 43917 - protein, 9 aa, synthetic construct
GSPAAAKLK

SEQ ID NO: 43918 - protein, 9 aa, synthetic construct
GSPAAIRVK

SEQ ID NO: 43919 - protein, 9 aa, synthetic construct
PLPATAKVR

SEQ ID NO: 43920 - protein, 9 aa, synthetic construct
GSPAAGRLK

SEQ ID NO: 43921 - protein, 9 aa, synthetic construct
GSPAAGKVR

SEQ ID NO: 43922 - protein, 9 aa, synthetic construct
GSPATVRLR

SEQ ID NO: 43923 - protein, 9 aa, synthetic construct
GSPATVRLK

SEQ ID NO: 43924 - protein, 9 aa, synthetic construct
GSPATVRVR

SEQ ID NO: 43925 - protein, 9 aa, synthetic construct
GSPATLHLR

SEQ ID NO: 43926 - protein, 9 aa, synthetic construct
GSPATLKLR

SEQ ID NO: 43927 - protein, 9 aa, synthetic construct
GSPATARVK

SEQ ID NO: 43928 - protein, 9 aa, synthetic construct
GSPATAKVR

SEQ ID NO: 43929 - protein, 9 aa, synthetic construct
GSPATIRLK

SEQ ID NO: 43930 - protein, 9 aa, synthetic construct
GSPATIRVR

SEQ ID NO: 43931 - protein, 9 aa, synthetic construct
GSPATIRVK

SEQ ID NO: 43932 - protein, 9 aa, synthetic construct
GSPASVHLR

SEQ ID NO: 43933 - protein, 9 aa, synthetic construct
GSPASVHVR

SEQ ID NO: 43934 - protein, 9 aa, synthetic construct
PLPATIRVR

SEQ ID NO: 43935 - protein, 9 aa, synthetic construct
GSPASVRLH

SEQ ID NO: 43936 - protein, 9 aa, synthetic construct
GSPASVKLR

SEQ ID NO: 43937 - protein, 9 aa, synthetic construct
GSPASLRVH

SEQ ID NO: 43938 - protein, 9 aa, synthetic construct
GSPASLKVR

SEQ ID NO: 43939 - protein, 9 aa, synthetic construct
GSPASARVK

SEQ ID NO: 43940 - protein, 9 aa, synthetic construct
GSPASIHLR

SEQ ID NO: 43941 - protein, 9 aa, synthetic construct
GSPASIRLF

SEQ ID NO: 43942 - protein, 9 aa, synthetic construct
GSPASIRVH

SEQ ID NO: 43943 - protein, 9 aa, synthetic construct
GSPASIRVK

SEQ ID NO: 43944 - protein, 9 aa, synthetic construct
GSPASIKLR

SEQ ID NO: 43945 - protein, 9 aa, synthetic construct
GSPASIKLK

SEQ ID NO: 43946 - protein, 9 aa, synthetic construct
GSPASGKVR

SEQ ID NO: 43947 - protein, 9 aa, synthetic construct
GSPAVVHLK

SEQ ID NO: 43948 - protein, 9 aa, synthetic construct
GSPAVVHVR

SEQ ID NO: 43949 - protein, 9 aa, synthetic construct
GSPAVVRVR

SEQ ID NO: 43950 - protein, 9 aa, synthetic construct
GSPAVVKVR

SEQ ID NO: 43951 - protein, 9 aa, synthetic construct
GSPAVLRVH

SEQ ID NO: 43952 - protein, 9 aa, synthetic construct
GSPAVLKLK

SEQ ID NO: 43953 - protein, 9 aa, synthetic construct
GSPAVLKVK

SEQ ID NO: 43954 - protein, 9 aa, synthetic construct
GSPAVARLY

SEQ ID NO: 43955 - protein, 9 aa, synthetic construct
GSPAVARVY

SEQ ID NO: 43956 - protein, 9 aa, synthetic construct
GSPAVARVF

SEQ ID NO: 43957 - protein, 9 aa, synthetic construct
GSPAVIRLY

SEQ ID NO: 43958 - protein, 9 aa, synthetic construct
GSPAVIRLH

SEQ ID NO: 43959 - protein, 9 aa, synthetic construct
GSPAVIRLK

SEQ ID NO: 43960 - protein, 9 aa, synthetic construct
GSPAVIRVF

SEQ ID NO: 43961 - protein, 9 aa, synthetic construct
GSPAVIKLK

SEQ ID NO: 43962 - protein, 9 aa, synthetic construct
GSPAVIKVR

SEQ ID NO: 43963 - protein, 9 aa, synthetic construct
GSPAVIKVK

SEQ ID NO: 43964 - protein, 9 aa, synthetic construct
GSPAVIKVF

SEQ ID NO: 43965 - protein, 9 aa, synthetic construct
GSPAVGHLF

SEQ ID NO: 43966 - protein, 9 aa, synthetic construct
GSPAVGHVR

SEQ ID NO: 43967 - protein, 9 aa, synthetic construct
GSPAVGRLY

SEQ ID NO: 43968 - protein, 9 aa, synthetic construct
GSPAVGRLR

SEQ ID NO: 43969 - protein, 9 aa, synthetic construct
GSPAVGRLH

SEQ ID NO: 43970 - protein, 9 aa, synthetic construct
GSPAVGKLR

SEQ ID NO: 43971 - protein, 9 aa, synthetic construct
GSPAVGKLK

SEQ ID NO: 43972 - protein, 9 aa, synthetic construct
GSPAVGKVK

SEQ ID NO: 43973 - protein, 9 aa, synthetic construct
GSPAGVKLR

SEQ ID NO: 43974 - protein, 9 aa, synthetic construct
GSPAGLHVR

SEQ ID NO: 43975 - protein, 9 aa, synthetic construct
GSPAGLHVH

SEQ ID NO: 43976 - protein, 9 aa, synthetic construct
GSPAGLRVF

SEQ ID NO: 43977 - protein, 9 aa, synthetic construct
GSPAGLKLH

SEQ ID NO: 43978 - protein, 9 aa, synthetic construct
GSPAGLKLK

SEQ ID NO: 43979 - protein, 9 aa, synthetic construct
GSPAGLKLF

SEQ ID NO: 43980 - protein, 9 aa, synthetic construct
GSPAGARLF

SEQ ID NO: 43981 - protein, 9 aa, synthetic construct
GSPAGARVY

SEQ ID NO: 43982 - protein, 9 aa, synthetic construct
GSPAGIRLK

SEQ ID NO: 43983 - protein, 9 aa, synthetic construct
PLPATGKVR

SEQ ID NO: 43984 - protein, 9 aa, synthetic construct
GSPAGIKLR

SEQ ID NO: 43985 - protein, 9 aa, synthetic construct
GSPAGGKVR

SEQ ID NO: 43986 - protein, 9 aa, synthetic construct
GSPAGGKVH

SEQ ID NO: 43987 - protein, 9 aa, synthetic construct
GANGAVHVR

SEQ ID NO: 43988 - protein, 9 aa, synthetic construct
GANGAVRVH

SEQ ID NO: 43989 - protein, 9 aa, synthetic construct
GANGALRLF

SEQ ID NO: 43990 - protein, 9 aa, synthetic construct
GANGAAHVR

SEQ ID NO: 43991 - protein, 9 aa, synthetic construct
GANGAARLH

SEQ ID NO: 43992 - protein, 9 aa, synthetic construct
GANGAIHVK

SEQ ID NO: 43993 - protein, 9 aa, synthetic construct
GANGAIRVH

SEQ ID NO: 43994 - protein, 9 aa, synthetic construct
GANGAIKLK

SEQ ID NO: 43995 - protein, 9 aa, synthetic construct
GANGAGHLY

SEQ ID NO: 43996 - protein, 9 aa, synthetic construct
GANGAGHLK

SEQ ID NO: 43997 - protein, 9 aa, synthetic construct
GANGAGHVH

SEQ ID NO: 43998 - protein, 9 aa, synthetic construct
PLPASVRLK

SEQ ID NO: 43999 - protein, 9 aa, synthetic construct
GANGTVRLF

SEQ ID NO: 44000 - protein, 9 aa, synthetic construct
GANGTVRVK

SEQ ID NO: 44001 - protein, 9 aa, synthetic construct
GANGTLRLF

SEQ ID NO: 44002 - protein, 9 aa, synthetic construct
GANGTLRVH

SEQ ID NO: 44003 - protein, 9 aa, synthetic construct
GANGTLKVH

SEQ ID NO: 44004 - protein, 9 aa, synthetic construct
PLPASVKLR

SEQ ID NO: 44005 - protein, 9 aa, synthetic construct
GANGTARLK

SEQ ID NO: 44006 - protein, 9 aa, synthetic construct
GANGTIRVK

SEQ ID NO: 44007 - protein, 9 aa, synthetic construct
PLPASVKVR

SEQ ID NO: 44008 - protein, 9 aa, synthetic construct
GANGTGHVR

SEQ ID NO: 44009 - protein, 9 aa, synthetic construct
PLPASVKVK

SEQ ID NO: 44010 - protein, 9 aa, synthetic construct
GANGTGRLK

SEQ ID NO: 44011 - protein, 9 aa, synthetic construct
GANGTGRVH

SEQ ID NO: 44012 - protein, 9 aa, synthetic construct
GANGTGRVK

SEQ ID NO: 44013 - protein, 9 aa, synthetic construct
GANGTGKVR

SEQ ID NO: 44014 - protein, 9 aa, synthetic construct
GANGSVRVY

SEQ ID NO: 44015 - protein, 9 aa, synthetic construct
GANGSVRVK

SEQ ID NO: 44016 - protein, 9 aa, synthetic construct
GANGSVKVY

SEQ ID NO: 44017 - protein, 9 aa, synthetic construct
GANGSVKVH

SEQ ID NO: 44018 - protein, 9 aa, synthetic construct
GANGSLHLH

SEQ ID NO: 44019 - protein, 9 aa, synthetic construct
GANGSLRLH

SEQ ID NO: 44020 - protein, 9 aa, synthetic construct
GANGSLRVK

SEQ ID NO: 44021 - protein, 9 aa, synthetic construct
GANGSLKLY

SEQ ID NO: 44022 - protein, 9 aa, synthetic construct
GANGSLKVY

SEQ ID NO: 44023 - protein, 9 aa, synthetic construct
GANGSLKVK

SEQ ID NO: 44024 - protein, 9 aa, synthetic construct
GANGSARVH

SEQ ID NO: 44025 - protein, 9 aa, synthetic construct
GANGSARVK

SEQ ID NO: 44026 - protein, 9 aa, synthetic construct
GANGSIKLY

SEQ ID NO: 44027 - protein, 9 aa, synthetic construct
GANGSIKLR

SEQ ID NO: 44028 - protein, 9 aa, synthetic construct
GANGSGHVK

SEQ ID NO: 44029 - protein, 9 aa, synthetic construct
GANGSGRLR

SEQ ID NO: 44030 - protein, 9 aa, synthetic construct
GANGSGRLH

SEQ ID NO: 44031 - protein, 9 aa, synthetic construct
GANGSGRVY

SEQ ID NO: 44032 - protein, 9 aa, synthetic construct
GANGSGRVR

SEQ ID NO: 44033 - protein, 9 aa, synthetic construct
GANGSGKLR

SEQ ID NO: 44034 - protein, 9 aa, synthetic construct
GANGVVHVY

SEQ ID NO: 44035 - protein, 9 aa, synthetic construct
GANGVVHVF

SEQ ID NO: 44036 - protein, 9 aa, synthetic construct
GANGVVRLK

SEQ ID NO: 44037 - protein, 9 aa, synthetic construct
GANGVVRVK

SEQ ID NO: 44038 - protein, 9 aa, synthetic construct
GANGVLHVH

SEQ ID NO: 44039 - protein, 9 aa, synthetic construct
GANGVLRLR

SEQ ID NO: 44040 - protein, 9 aa, synthetic construct
GANGVLKLK

SEQ ID NO: 44041 - protein, 9 aa, synthetic construct
GANGVLKVR

SEQ ID NO: 44042 - protein, 9 aa, synthetic construct
GANGVLKVK

SEQ ID NO: 44043 - protein, 9 aa, synthetic construct
GANGVAKLR

SEQ ID NO: 44044 - protein, 9 aa, synthetic construct
GANGVAKLF

SEQ ID NO: 44045 - protein, 9 aa, synthetic construct
PLPASLKLF

SEQ ID NO: 44046 - protein, 9 aa, synthetic construct
GANGVIHLH

SEQ ID NO: 44047 - protein, 9 aa, synthetic construct
GANGVIRLK

SEQ ID NO: 44048 - protein, 9 aa, synthetic construct
GANGVIRVK

SEQ ID NO: 44049 - protein, 9 aa, synthetic construct
GANGVIRVF

SEQ ID NO: 44050 - protein, 9 aa, synthetic construct
GANGVIKLR

SEQ ID NO: 44051 - protein, 9 aa, synthetic construct
GANGVIKLK

SEQ ID NO: 44052 - protein, 9 aa, synthetic construct
GANGVIKVY

SEQ ID NO: 44053 - protein, 9 aa, synthetic construct
PLPASLKVH

SEQ ID NO: 44054 - protein, 9 aa, synthetic construct
GANGVGHLY

SEQ ID NO: 44055 - protein, 9 aa, synthetic construct
GANGVGHLR

SEQ ID NO: 44056 - protein, 9 aa, synthetic construct
GANGVGHLF

SEQ ID NO: 44057 - protein, 9 aa, synthetic construct
GANGVGHVR

SEQ ID NO: 44058 - protein, 9 aa, synthetic construct
PLPASLKVK

SEQ ID NO: 44059 - protein, 9 aa, synthetic construct
GANGVGRLY

SEQ ID NO: 44060 - protein, 9 aa, synthetic construct
GANGVGRLK

SEQ ID NO: 44061 - protein, 9 aa, synthetic construct
GANGVGRVR

SEQ ID NO: 44062 - protein, 9 aa, synthetic construct
GANGVGKLR

SEQ ID NO: 44063 - protein, 9 aa, synthetic construct
GANGVGKLK

SEQ ID NO: 44064 - protein, 9 aa, synthetic construct
GANGVGKVK

SEQ ID NO: 44065 - protein, 9 aa, synthetic construct
GANGGVHLY

SEQ ID NO: 44066 - protein, 9 aa, synthetic construct
GANGGVRVY

SEQ ID NO: 44067 - protein, 9 aa, synthetic construct
GANGGVRVR

SEQ ID NO: 44068 - protein, 9 aa, synthetic construct
GANGGVKLK

SEQ ID NO: 44069 - protein, 9 aa, synthetic construct
GANGGLRVY

SEQ ID NO: 44070 - protein, 9 aa, synthetic construct
GANGGLRVH

SEQ ID NO: 44071 - protein, 9 aa, synthetic construct
GANGGLRVF

SEQ ID NO: 44072 - protein, 9 aa, synthetic construct
GANGGAHLY

SEQ ID NO: 44073 - protein, 9 aa, synthetic construct
GANGGARLH

SEQ ID NO: 44074 - protein, 9 aa, synthetic construct
GANGGARVH

SEQ ID NO: 44075 - protein, 9 aa, synthetic construct
GANGGGKLR

SEQ ID NO: 44076 - protein, 9 aa, synthetic construct
GANAAVRVR

SEQ ID NO: 44077 - protein, 9 aa, synthetic construct
PLPASARVK

SEQ ID NO: 44078 - protein, 9 aa, synthetic construct
GANAALRLY

SEQ ID NO: 44079 - protein, 9 aa, synthetic construct
GANAALRLF

SEQ ID NO: 44080 - protein, 9 aa, synthetic construct
GANAALRVY

SEQ ID NO: 44081 - protein, 9 aa, synthetic construct
GANAALRVR

SEQ ID NO: 44082 - protein, 9 aa, synthetic construct
GANAALKVK

SEQ ID NO: 44083 - protein, 9 aa, synthetic construct
GANAAARVK

SEQ ID NO: 44084 - protein, 9 aa, synthetic construct
GANAAAKLK

SEQ ID NO: 44085 - protein, 9 aa, synthetic construct
GANAAIRLY

SEQ ID NO: 44086 - protein, 9 aa, synthetic construct
GANAAIRLK

SEQ ID NO: 44087 - protein, 9 aa, synthetic construct
GANAAIRLF

SEQ ID NO: 44088 - protein, 9 aa, synthetic construct
GANAAIRVR

SEQ ID NO: 44089 - protein, 9 aa, synthetic construct
GANAAIRVK

SEQ ID NO: 44090 - protein, 9 aa, synthetic construct
GANAAIKVK

SEQ ID NO: 44091 - protein, 9 aa, synthetic construct
GANAAGHVR

SEQ ID NO: 44092 - protein, 9 aa, synthetic construct
GANAAGRLK

SEQ ID NO: 44093 - protein, 9 aa, synthetic construct
GANAAGRVR

SEQ ID NO: 44094 - protein, 9 aa, synthetic construct
GANAAGKLR

SEQ ID NO: 44095 - protein, 9 aa, synthetic construct
GANAAGKLK

SEQ ID NO: 44096 - protein, 9 aa, synthetic construct
GANATVRLY

SEQ ID NO: 44097 - protein, 9 aa, synthetic construct
GANATVRLR

SEQ ID NO: 44098 - protein, 9 aa, synthetic construct
GANATVRLH

SEQ ID NO: 44099 - protein, 9 aa, synthetic construct
GANATVRLF

SEQ ID NO: 44100 - protein, 9 aa, synthetic construct
PLPASIHLH

SEQ ID NO: 44101 - protein, 9 aa, synthetic construct
GANATVKLH

SEQ ID NO: 44102 - protein, 9 aa, synthetic construct
GANATVKLK

SEQ ID NO: 44103 - protein, 9 aa, synthetic construct
GANATLHLR

SEQ ID NO: 44104 - protein, 9 aa, synthetic construct
GANATLRLH

SEQ ID NO: 44105 - protein, 9 aa, synthetic construct
GANATLRLF

SEQ ID NO: 44106 - protein, 9 aa, synthetic construct
GANATLRVH

SEQ ID NO: 44107 - protein, 9 aa, synthetic construct
GANATLKLK

SEQ ID NO: 44108 - protein, 9 aa, synthetic construct
GANATLKVY

SEQ ID NO: 44109 - protein, 9 aa, synthetic construct
GANATLKVF

SEQ ID NO: 44110 - protein, 9 aa, synthetic construct
GANATAHLF

SEQ ID NO: 44111 - protein, 9 aa, synthetic construct
GANATARLY

SEQ ID NO: 44112 - protein, 9 aa, synthetic construct
GANATARVY

SEQ ID NO: 44113 - protein, 9 aa, synthetic construct
GANATARVK

SEQ ID NO: 44114 - protein, 9 aa, synthetic construct
GANATAKLR

SEQ ID NO: 44115 - protein, 9 aa, synthetic construct
GANATGHLR

SEQ ID NO: 44116 - protein, 9 aa, synthetic construct
GANATGHVF

SEQ ID NO: 44117 - protein, 9 aa, synthetic construct
GANATGRLK

SEQ ID NO: 44118 - protein, 9 aa, synthetic construct
GANATGRVR

SEQ ID NO: 44119 - protein, 9 aa, synthetic construct
PLPASIRLF

SEQ ID NO: 44120 - protein, 9 aa, synthetic construct
GANASVHLK

SEQ ID NO: 44121 - protein, 9 aa, synthetic construct
GANASVHLF

SEQ ID NO: 44122 - protein, 9 aa, synthetic construct
PLPASIRVR

SEQ ID NO: 44123 - protein, 9 aa, synthetic construct
GANASVRVY

SEQ ID NO: 44124 - protein, 9 aa, synthetic construct
GANASVRVK

SEQ ID NO: 44125 - protein, 9 aa, synthetic construct
GANASLHLK

SEQ ID NO: 44126 - protein, 9 aa, synthetic construct
GANASLHVF

SEQ ID NO: 44127 - protein, 9 aa, synthetic construct
GANASLRLY

SEQ ID NO: 44128 - protein, 9 aa, synthetic construct
GANASLRVY

SEQ ID NO: 44129 - protein, 9 aa, synthetic construct
GANASLRVH

SEQ ID NO: 44130 - protein, 9 aa, synthetic construct
GANASLKLH

SEQ ID NO: 44131 - protein, 9 aa, synthetic construct
GANASLKLF

SEQ ID NO: 44132 - protein, 9 aa, synthetic construct
GANASAHLR

SEQ ID NO: 44133 - protein, 9 aa, synthetic construct
GANASAHVY

SEQ ID NO: 44134 - protein, 9 aa, synthetic construct
GANASARLF

SEQ ID NO: 44135 - protein, 9 aa, synthetic construct
GANASARVY

SEQ ID NO: 44136 - protein, 9 aa, synthetic construct
GANASAKLR

SEQ ID NO: 44137 - protein, 9 aa, synthetic construct
GANASIRVY

SEQ ID NO: 44138 - protein, 9 aa, synthetic construct
GANASIRVR

SEQ ID NO: 44139 - protein, 9 aa, synthetic construct
GANASIRVK

SEQ ID NO: 44140 - protein, 9 aa, synthetic construct
GANASIKVY

SEQ ID NO: 44141 - protein, 9 aa, synthetic construct
GANASIKVR

SEQ ID NO: 44142 - protein, 9 aa, synthetic construct
GANASIKVK

SEQ ID NO: 44143 - protein, 9 aa, synthetic construct
GANASGHVY

SEQ ID NO: 44144 - protein, 9 aa, synthetic construct
GANASGHVR

SEQ ID NO: 44145 - protein, 9 aa, synthetic construct
GANASGRVK

SEQ ID NO: 44146 - protein, 9 aa, synthetic construct
GANASGKLK

SEQ ID NO: 44147 - protein, 9 aa, synthetic construct
GANASGKVH

SEQ ID NO: 44148 - protein, 9 aa, synthetic construct
GANAVVRLR

SEQ ID NO: 44149 - protein, 9 aa, synthetic construct
GANAVVRVR

SEQ ID NO: 44150 - protein, 9 aa, synthetic construct
GANAVVKLR

SEQ ID NO: 44151 - protein, 9 aa, synthetic construct
GANAVVKVR

SEQ ID NO: 44152 - protein, 9 aa, synthetic construct
GANAVLHLF

SEQ ID NO: 44153 - protein, 9 aa, synthetic construct
GANAVLRVH

SEQ ID NO: 44154 - protein, 9 aa, synthetic construct
GANAVLRVF

SEQ ID NO: 44155 - protein, 9 aa, synthetic construct
GANAVLKLY

SEQ ID NO: 44156 - protein, 9 aa, synthetic construct
GANAVLKLR

SEQ ID NO: 44157 - protein, 9 aa, synthetic construct
GANAVLKVH

SEQ ID NO: 44158 - protein, 9 aa, synthetic construct
GANAVARLF

SEQ ID NO: 44159 - protein, 9 aa, synthetic construct
GANAVARVY

SEQ ID NO: 44160 - protein, 9 aa, synthetic construct
GANAVARVH

SEQ ID NO: 44161 - protein, 9 aa, synthetic construct
GANAVARVK

SEQ ID NO: 44162 - protein, 9 aa, synthetic construct
GANAVAKVY

SEQ ID NO: 44163 - protein, 9 aa, synthetic construct
GANAVIHLF

SEQ ID NO: 44164 - protein, 9 aa, synthetic construct
GANAVIRVR

SEQ ID NO: 44165 - protein, 9 aa, synthetic construct
GANAVIRVK

SEQ ID NO: 44166 - protein, 9 aa, synthetic construct
GANAVIKLY

SEQ ID NO: 44167 - protein, 9 aa, synthetic construct
GANAVIKVK

SEQ ID NO: 44168 - protein, 9 aa, synthetic construct
GANAVIKVF

SEQ ID NO: 44169 - protein, 9 aa, synthetic construct
GANAVGHLF

SEQ ID NO: 44170 - protein, 9 aa, synthetic construct
GANAVGHVK

SEQ ID NO: 44171 - protein, 9 aa, synthetic construct
GANAVGRLH

SEQ ID NO: 44172 - protein, 9 aa, synthetic construct
GANAVGRVK

SEQ ID NO: 44173 - protein, 9 aa, synthetic construct
GANAVGKVR

SEQ ID NO: 44174 - protein, 9 aa, synthetic construct
GANAVGKVH

SEQ ID NO: 44175 - protein, 9 aa, synthetic construct
GANAVGKVK

SEQ ID NO: 44176 - protein, 9 aa, synthetic construct
PLPASGRVR

SEQ ID NO: 44177 - protein, 9 aa, synthetic construct
GANAGVRLY

SEQ ID NO: 44178 - protein, 9 aa, synthetic construct
GANAGVRLH

SEQ ID NO: 44179 - protein, 9 aa, synthetic construct
GANAGVRLK

SEQ ID NO: 44180 - protein, 9 aa, synthetic construct
GANAGVRLF

SEQ ID NO: 44181 - protein, 9 aa, synthetic construct
GANAGVRVR

SEQ ID NO: 44182 - protein, 9 aa, synthetic construct
GANAGVRVK

SEQ ID NO: 44183 - protein, 9 aa, synthetic construct
GANAGVKLR

SEQ ID NO: 44184 - protein, 9 aa, synthetic construct
GANAGVKLH

SEQ ID NO: 44185 - protein, 9 aa, synthetic construct
GANAGVKLK

SEQ ID NO: 44186 - protein, 9 aa, synthetic construct
GANAGVKVK

SEQ ID NO: 44187 - protein, 9 aa, synthetic construct
GANAGLKVY

SEQ ID NO: 44188 - protein, 9 aa, synthetic construct
GANAGAHLR

SEQ ID NO: 44189 - protein, 9 aa, synthetic construct
GANAGAHLF

SEQ ID NO: 44190 - protein, 9 aa, synthetic construct
GANAGARLF

SEQ ID NO: 44191 - protein, 9 aa, synthetic construct
GANAGAKLH

SEQ ID NO: 44192 - protein, 9 aa, synthetic construct
GANAGAKVH

SEQ ID NO: 44193 - protein, 9 aa, synthetic construct
GANAGIRVR

SEQ ID NO: 44194 - protein, 9 aa, synthetic construct
GANAGIRVH

SEQ ID NO: 44195 - protein, 9 aa, synthetic construct
GANAGIKLK

SEQ ID NO: 44196 - protein, 9 aa, synthetic construct
GANAGIKVR

SEQ ID NO: 44197 - protein, 9 aa, synthetic construct
GANAGGHLK

SEQ ID NO: 44198 - protein, 9 aa, synthetic construct
GANAGGHLF

SEQ ID NO: 44199 - protein, 9 aa, synthetic construct
GANAGGHVF

SEQ ID NO: 44200 - protein, 9 aa, synthetic construct
GANAGGRVH

SEQ ID NO: 44201 - protein, 9 aa, synthetic construct
GANAGGRVK

SEQ ID NO: 44202 - protein, 9 aa, synthetic construct
GANAGGKLR

SEQ ID NO: 44203 - protein, 9 aa, synthetic construct
GANAGGKLK

SEQ ID NO: 44204 - protein, 9 aa, synthetic construct
GANAGGKVR

SEQ ID NO: 44205 - protein, 9 aa, synthetic construct
GAQGAVHLR

SEQ ID NO: 44206 - protein, 9 aa, synthetic construct
GAQGAVHVY

SEQ ID NO: 44207 - protein, 9 aa, synthetic construct
GAQGAVHVR

SEQ ID NO: 44208 - protein, 9 aa, synthetic construct
GAQGAVRVY

SEQ ID NO: 44209 - protein, 9 aa, synthetic construct
GAQGAVRVH

SEQ ID NO: 44210 - protein, 9 aa, synthetic construct
GAQGAVRVF

SEQ ID NO: 44211 - protein, 9 aa, synthetic construct
GAQGAVKLY

SEQ ID NO: 44212 - protein, 9 aa, synthetic construct
GAQGAVKVR

SEQ ID NO: 44213 - protein, 9 aa, synthetic construct
GAQGAVKVH

SEQ ID NO: 44214 - protein, 9 aa, synthetic construct
GAQGAVKVF

SEQ ID NO: 44215 - protein, 9 aa, synthetic construct
GAQGALRVF

SEQ ID NO: 44216 - protein, 9 aa, synthetic construct
GAQGALKLY

SEQ ID NO: 44217 - protein, 9 aa, synthetic construct
GAQGALKLF

SEQ ID NO: 44218 - protein, 9 aa, synthetic construct
GAQGAAHLH

SEQ ID NO: 44219 - protein, 9 aa, synthetic construct
GAQGAARLY

SEQ ID NO: 44220 - protein, 9 aa, synthetic construct
GAQGAAKLY

SEQ ID NO: 44221 - protein, 9 aa, synthetic construct
GAQGAIHLF

SEQ ID NO: 44222 - protein, 9 aa, synthetic construct
GAQGAIKLR

SEQ ID NO: 44223 - protein, 9 aa, synthetic construct
GAQGAIKVR

SEQ ID NO: 44224 - protein, 9 aa, synthetic construct
GAQGAGHVR

SEQ ID NO: 44225 - protein, 9 aa, synthetic construct
GAQGAGKVH

SEQ ID NO: 44226 - protein, 9 aa, synthetic construct
PLPAVVRVR

SEQ ID NO: 44227 - protein, 9 aa, synthetic construct
GAQGTVKLR

SEQ ID NO: 44228 - protein, 9 aa, synthetic construct
GAQGTVKVY

SEQ ID NO: 44229 - protein, 9 aa, synthetic construct
GAQGTVKVK

SEQ ID NO: 44230 - protein, 9 aa, synthetic construct
PLPAVVRVK

SEQ ID NO: 44231 - protein, 9 aa, synthetic construct
GAQGTLHLF

SEQ ID NO: 44232 - protein, 9 aa, synthetic construct
GAQGTLRLH

SEQ ID NO: 44233 - protein, 9 aa, synthetic construct
GAQGTLRVY

SEQ ID NO: 44234 - protein, 9 aa, synthetic construct
GAQGTLRVH

SEQ ID NO: 44235 - protein, 9 aa, synthetic construct
GAQGTLRVK

SEQ ID NO: 44236 - protein, 9 aa, synthetic construct
GAQGTLKLR

SEQ ID NO: 44237 - protein, 9 aa, synthetic construct
GAQGTLKLF

SEQ ID NO: 44238 - protein, 9 aa, synthetic construct
GAQGTLKVY

SEQ ID NO: 44239 - protein, 9 aa, synthetic construct
GAQGTLKVK

SEQ ID NO: 44240 - protein, 9 aa, synthetic construct
PLPAVVKLR

SEQ ID NO: 44241 - protein, 9 aa, synthetic construct
GAQGTARVK

SEQ ID NO: 44242 - protein, 9 aa, synthetic construct
GAQGTAKLR

SEQ ID NO: 44243 - protein, 9 aa, synthetic construct
GAQGTAKLK

SEQ ID NO: 44244 - protein, 9 aa, synthetic construct
GAQGTAKVK

SEQ ID NO: 44245 - protein, 9 aa, synthetic construct
GAQGTIRLR

SEQ ID NO: 44246 - protein, 9 aa, synthetic construct
GAQGTIRLK

SEQ ID NO: 44247 - protein, 9 aa, synthetic construct
GAQGTIRVF

SEQ ID NO: 44248 - protein, 9 aa, synthetic construct
PLPAVVKVR

SEQ ID NO: 44249 - protein, 9 aa, synthetic construct
GAQGTIKLR

SEQ ID NO: 44250 - protein, 9 aa, synthetic construct
GAQGTIKLK

SEQ ID NO: 44251 - protein, 9 aa, synthetic construct
GAQGTIKLF

SEQ ID NO: 44252 - protein, 9 aa, synthetic construct
GAQGTGRLR

SEQ ID NO: 44253 - protein, 9 aa, synthetic construct
GAQGTGRVH

SEQ ID NO: 44254 - protein, 9 aa, synthetic construct
GAQGTGKLR

SEQ ID NO: 44255 - protein, 9 aa, synthetic construct
GAQGTGKLK

SEQ ID NO: 44256 - protein, 9 aa, synthetic construct
GAQGTGKVR

SEQ ID NO: 44257 - protein, 9 aa, synthetic construct
GAQGTGKVK

SEQ ID NO: 44258 - protein, 9 aa, synthetic construct
GAQGSVRVK

SEQ ID NO: 44259 - protein, 9 aa, synthetic construct
GAQGSVKLK

SEQ ID NO: 44260 - protein, 9 aa, synthetic construct
GAQGSLHVY

SEQ ID NO: 44261 - protein, 9 aa, synthetic construct
GAQGSLHVR

SEQ ID NO: 44262 - protein, 9 aa, synthetic construct
GAQGSLRLH

SEQ ID NO: 44263 - protein, 9 aa, synthetic construct
GAQGSLRLF

SEQ ID NO: 44264 - protein, 9 aa, synthetic construct
GAQGSLKLY

SEQ ID NO: 44265 - protein, 9 aa, synthetic construct
GAQGSLKLR

SEQ ID NO: 44266 - protein, 9 aa, synthetic construct
GAQGSLKVR

SEQ ID NO: 44267 - protein, 9 aa, synthetic construct
GAQGSARLH

SEQ ID NO: 44268 - protein, 9 aa, synthetic construct
GAQGSARVH

SEQ ID NO: 44269 - protein, 9 aa, synthetic construct
GAQGSIHLF

SEQ ID NO: 44270 - protein, 9 aa, synthetic construct
GAQGSIRLY

SEQ ID NO: 44271 - protein, 9 aa, synthetic construct
GAQGSIRLR

SEQ ID NO: 44272 - protein, 9 aa, synthetic construct
GAQGSIRVK

SEQ ID NO: 44273 - protein, 9 aa, synthetic construct
GAQGSIKLR

SEQ ID NO: 44274 - protein, 9 aa, synthetic construct
GAQGSIKLK

SEQ ID NO: 44275 - protein, 9 aa, synthetic construct
GAQGSGHVR

SEQ ID NO: 44276 - protein, 9 aa, synthetic construct
GAQGSGHVK

SEQ ID NO: 44277 - protein, 9 aa, synthetic construct
GAQGSGHVF

SEQ ID NO: 44278 - protein, 9 aa, synthetic construct
GAQGSGRLH

SEQ ID NO: 44279 - protein, 9 aa, synthetic construct
GAQGSGRLK

SEQ ID NO: 44280 - protein, 9 aa, synthetic construct
GAQGSGRVY

SEQ ID NO: 44281 - protein, 9 aa, synthetic construct
GAQGSGRVR

SEQ ID NO: 44282 - protein, 9 aa, synthetic construct
GAQGSGKLH

SEQ ID NO: 44283 - protein, 9 aa, synthetic construct
GAQGSGKVK

SEQ ID NO: 44284 - protein, 9 aa, synthetic construct
GAQGVVKVK

SEQ ID NO: 44285 - protein, 9 aa, synthetic construct
GAQGVLRVY

SEQ ID NO: 44286 - protein, 9 aa, synthetic construct
GAQGVLKLK

SEQ ID NO: 44287 - protein, 9 aa, synthetic construct
GAQGVLKVH

SEQ ID NO: 44288 - protein, 9 aa, synthetic construct
GAQGVARLY

SEQ ID NO: 44289 - protein, 9 aa, synthetic construct
GAQGVARVH

SEQ ID NO: 44290 - protein, 9 aa, synthetic construct
GAQGVAKVK

SEQ ID NO: 44291 - protein, 9 aa, synthetic construct
GAQGVIHVY

SEQ ID NO: 44292 - protein, 9 aa, synthetic construct
GAQGVIHVF

SEQ ID NO: 44293 - protein, 9 aa, synthetic construct
GAQGVIRLR

SEQ ID NO: 44294 - protein, 9 aa, synthetic construct
GAQGVIRVY

SEQ ID NO: 44295 - protein, 9 aa, synthetic construct
GAQGVIRVK

SEQ ID NO: 44296 - protein, 9 aa, synthetic construct
PLPAVLKVR

SEQ ID NO: 44297 - protein, 9 aa, synthetic construct
GAQGVIKVK

SEQ ID NO: 44298 - protein, 9 aa, synthetic construct
GAQGVGHLF

SEQ ID NO: 44299 - protein, 9 aa, synthetic construct
PLPAVLKVK

SEQ ID NO: 44300 - protein, 9 aa, synthetic construct
GAQGVGRLH

SEQ ID NO: 44301 - protein, 9 aa, synthetic construct
GAQGVGRVR

SEQ ID NO: 44302 - protein, 9 aa, synthetic construct
GAQGVGRVK

SEQ ID NO: 44303 - protein, 9 aa, synthetic construct
GAQGVGKVR

SEQ ID NO: 44304 - protein, 9 aa, synthetic construct
GAQGVGKVH

SEQ ID NO: 44305 - protein, 9 aa, synthetic construct
GAQGVGKVK

SEQ ID NO: 44306 - protein, 9 aa, synthetic construct
GAQGGVHLY

SEQ ID NO: 44307 - protein, 9 aa, synthetic construct
GAQGGVHLR

SEQ ID NO: 44308 - protein, 9 aa, synthetic construct
GAQGGVHVY

SEQ ID NO: 44309 - protein, 9 aa, synthetic construct
GAQGGVRVK

SEQ ID NO: 44310 - protein, 9 aa, synthetic construct
GAQGGVRVF

SEQ ID NO: 44311 - protein, 9 aa, synthetic construct
GAQGGVKVK

SEQ ID NO: 44312 - protein, 9 aa, synthetic construct
GAQGGLHLY

SEQ ID NO: 44313 - protein, 9 aa, synthetic construct
GAQGGLHLH

SEQ ID NO: 44314 - protein, 9 aa, synthetic construct
GAQGGLHLF

SEQ ID NO: 44315 - protein, 9 aa, synthetic construct
GAQGGLHVY

SEQ ID NO: 44316 - protein, 9 aa, synthetic construct
GAQGGLHVR

SEQ ID NO: 44317 - protein, 9 aa, synthetic construct
GAQGGLHVF

SEQ ID NO: 44318 - protein, 9 aa, synthetic construct
GAQGGLRVH

SEQ ID NO: 44319 - protein, 9 aa, synthetic construct
GAQGGLKLY

SEQ ID NO: 44320 - protein, 9 aa, synthetic construct
GAQGGLKLH

SEQ ID NO: 44321 - protein, 9 aa, synthetic construct
GAQGGLKLK

SEQ ID NO: 44322 - protein, 9 aa, synthetic construct
GAQGGLKLF

SEQ ID NO: 44323 - protein, 9 aa, synthetic construct
GAQGGLKVR

SEQ ID NO: 44324 - protein, 9 aa, synthetic construct
GAQGGARVR

SEQ ID NO: 44325 - protein, 9 aa, synthetic construct
GAQGGIHLF

SEQ ID NO: 44326 - protein, 9 aa, synthetic construct
GAQGGIRVR

SEQ ID NO: 44327 - protein, 9 aa, synthetic construct
PLPAVARLR

SEQ ID NO: 44328 - protein, 9 aa, synthetic construct
GAQGGIKLK

SEQ ID NO: 44329 - protein, 9 aa, synthetic construct
GAQGGGHLY

SEQ ID NO: 44330 - protein, 9 aa, synthetic construct
GAQGGGHLH

SEQ ID NO: 44331 - protein, 9 aa, synthetic construct
GAQGGGHLK

SEQ ID NO: 44332 - protein, 9 aa, synthetic construct
GAQGGGHVY

SEQ ID NO: 44333 - protein, 9 aa, synthetic construct
GAQGGGHVH

SEQ ID NO: 44334 - protein, 9 aa, synthetic construct
GAQGGGRLY

SEQ ID NO: 44335 - protein, 9 aa, synthetic construct
GAQGGGRLH

SEQ ID NO: 44336 - protein, 9 aa, synthetic construct
GAQGGGRLK

SEQ ID NO: 44337 - protein, 9 aa, synthetic construct
GAQGGGRVH

SEQ ID NO: 44338 - protein, 9 aa, synthetic construct
GAQGGGRVK

SEQ ID NO: 44339 - protein, 9 aa, synthetic construct
GAQAAVRVK

SEQ ID NO: 44340 - protein, 9 aa, synthetic construct
GAQAAVKVR

SEQ ID NO: 44341 - protein, 9 aa, synthetic construct
GAQAAVKVK

SEQ ID NO: 44342 - protein, 9 aa, synthetic construct
GAQAALRLF

SEQ ID NO: 44343 - protein, 9 aa, synthetic construct
GAQAAARLK

SEQ ID NO: 44344 - protein, 9 aa, synthetic construct
GAQAAAKVR

SEQ ID NO: 44345 - protein, 9 aa, synthetic construct
GAQAAIRLR

SEQ ID NO: 44346 - protein, 9 aa, synthetic construct
GAQAAIRVK

SEQ ID NO: 44347 - protein, 9 aa, synthetic construct
GAQAAIKLR

SEQ ID NO: 44348 - protein, 9 aa, synthetic construct
GAQAAGRLK

SEQ ID NO: 44349 - protein, 9 aa, synthetic construct
GAQAAGRVR

SEQ ID NO: 44350 - protein, 9 aa, synthetic construct
GAQAAGKLK

SEQ ID NO: 44351 - protein, 9 aa, synthetic construct
GAQAAGKVR

SEQ ID NO: 44352 - protein, 9 aa, synthetic construct
GAQATVRLK

SEQ ID NO: 44353 - protein, 9 aa, synthetic construct
GAQATVRLF

SEQ ID NO: 44354 - protein, 9 aa, synthetic construct
GAQATVRVK

SEQ ID NO: 44355 - protein, 9 aa, synthetic construct
GAQATVKLK

SEQ ID NO: 44356 - protein, 9 aa, synthetic construct
GAQATVKVR

SEQ ID NO: 44357 - protein, 9 aa, synthetic construct
GAQATVKVH

SEQ ID NO: 44358 - protein, 9 aa, synthetic construct
GAQATLRVR

SEQ ID NO: 44359 - protein, 9 aa, synthetic construct
PLPAVIHVR

SEQ ID NO: 44360 - protein, 9 aa, synthetic construct
GAQATARLK

SEQ ID NO: 44361 - protein, 9 aa, synthetic construct
GAQATAKLK

SEQ ID NO: 44362 - protein, 9 aa, synthetic construct
GAQATIRVF

SEQ ID NO: 44363 - protein, 9 aa, synthetic construct
GAQATIKLR

SEQ ID NO: 44364 - protein, 9 aa, synthetic construct
PLPAVIRLK

SEQ ID NO: 44365 - protein, 9 aa, synthetic construct
GAQATGKLR

SEQ ID NO: 44366 - protein, 9 aa, synthetic construct
GAQATGKLK

SEQ ID NO: 44367 - protein, 9 aa, synthetic construct
GAQASVRLF

SEQ ID NO: 44368 - protein, 9 aa, synthetic construct
GAQASVRVK

SEQ ID NO: 44369 - protein, 9 aa, synthetic construct
GAQASLRVH

SEQ ID NO: 44370 - protein, 9 aa, synthetic construct
GAQASLKVY

SEQ ID NO: 44371 - protein, 9 aa, synthetic construct
GAQASLKVK

SEQ ID NO: 44372 - protein, 9 aa, synthetic construct
GAQASARVY

SEQ ID NO: 44373 - protein, 9 aa, synthetic construct
GAQASARVH

SEQ ID NO: 44374 - protein, 9 aa, synthetic construct
PLPAVIKLK

SEQ ID NO: 44375 - protein, 9 aa, synthetic construct
GAQASAKVY

SEQ ID NO: 44376 - protein, 9 aa, synthetic construct
GAQASIHLH

SEQ ID NO: 44377 - protein, 9 aa, synthetic construct
GAQASIHLF

SEQ ID NO: 44378 - protein, 9 aa, synthetic construct
GAQASIRLY

SEQ ID NO: 44379 - protein, 9 aa, synthetic construct
GAQASIRLR

SEQ ID NO: 44380 - protein, 9 aa, synthetic construct
GAQASIRVY

SEQ ID NO: 44381 - protein, 9 aa, synthetic construct
GAQASIRVH

SEQ ID NO: 44382 - protein, 9 aa, synthetic construct
GAQASIKVR

SEQ ID NO: 44383 - protein, 9 aa, synthetic construct
GAQASGRLK

SEQ ID NO: 44384 - protein, 9 aa, synthetic construct
GAQASGRVH

SEQ ID NO: 44385 - protein, 9 aa, synthetic construct
GAQASGKLR

SEQ ID NO: 44386 - protein, 9 aa, synthetic construct
GAQASGKLK

SEQ ID NO: 44387 - protein, 9 aa, synthetic construct
GAQAVVRVY

SEQ ID NO: 44388 - protein, 9 aa, synthetic construct
GAQAVVRVH

SEQ ID NO: 44389 - protein, 9 aa, synthetic construct
GAQAVLRLY

SEQ ID NO: 44390 - protein, 9 aa, synthetic construct
GAQAVLRVY

SEQ ID NO: 44391 - protein, 9 aa, synthetic construct
GAQAVLRVK

SEQ ID NO: 44392 - protein, 9 aa, synthetic construct
GAQAVLRVF

SEQ ID NO: 44393 - protein, 9 aa, synthetic construct
GAQAVLKLF

SEQ ID NO: 44394 - protein, 9 aa, synthetic construct
GAQAVLKVR

SEQ ID NO: 44395 - protein, 9 aa, synthetic construct
GAQAVARLY

SEQ ID NO: 44396 - protein, 9 aa, synthetic construct
GAQAVARLK

SEQ ID NO: 44397 - protein, 9 aa, synthetic construct
GAQAVARLF

SEQ ID NO: 44398 - protein, 9 aa, synthetic construct
GAQAVARVR

SEQ ID NO: 44399 - protein, 9 aa, synthetic construct
GAQAVIHVY

SEQ ID NO: 44400 - protein, 9 aa, synthetic construct
GAQAVIRLY

SEQ ID NO: 44401 - protein, 9 aa, synthetic construct
GAQAVIRVY

SEQ ID NO: 44402 - protein, 9 aa, synthetic construct
GAQAVIRVR

SEQ ID NO: 44403 - protein, 9 aa, synthetic construct
GAQAVIKLF

SEQ ID NO: 44404 - protein, 9 aa, synthetic construct
GAQAVIKVY

SEQ ID NO: 44405 - protein, 9 aa, synthetic construct
GAQAVGRLR

SEQ ID NO: 44406 - protein, 9 aa, synthetic construct
GAQAGLHVH

SEQ ID NO: 44407 - protein, 9 aa, synthetic construct
GAQAGLKLY

SEQ ID NO: 44408 - protein, 9 aa, synthetic construct
GAQAGLKLH

SEQ ID NO: 44409 - protein, 9 aa, synthetic construct
GAQAGLKVY

SEQ ID NO: 44410 - protein, 9 aa, synthetic construct
GAQAGAHLF

SEQ ID NO: 44411 - protein, 9 aa, synthetic construct
PLPAVGKLK

SEQ ID NO: 44412 - protein, 9 aa, synthetic construct
GAQAGAKLR

SEQ ID NO: 44413 - protein, 9 aa, synthetic construct
GAQAGAKVH

SEQ ID NO: 44414 - protein, 9 aa, synthetic construct
GAQAGIHLY

SEQ ID NO: 44415 - protein, 9 aa, synthetic construct
GAQAGIHVF

SEQ ID NO: 44416 - protein, 9 aa, synthetic construct
GAQAGIKLH

SEQ ID NO: 44417 - protein, 9 aa, synthetic construct
GAQAGIKVR

SEQ ID NO: 44418 - protein, 9 aa, synthetic construct
GAQAGGHLY

SEQ ID NO: 44419 - protein, 9 aa, synthetic construct
GAQAGGHLH

SEQ ID NO: 44420 - protein, 9 aa, synthetic construct
GAQAGGHVK

SEQ ID NO: 44421 - protein, 9 aa, synthetic construct
PLPAVGKVK

SEQ ID NO: 44422 - protein, 9 aa, synthetic construct
GAQAGGRVH

SEQ ID NO: 44423 - protein, 9 aa, synthetic construct
GAQAGGKLY

SEQ ID NO: 44424 - protein, 9 aa, synthetic construct
GAQAGGKVH

SEQ ID NO: 44425 - protein, 9 aa, synthetic construct
GAPGAVHLR

SEQ ID NO: 44426 - protein, 9 aa, synthetic construct
GAPGALHLR

SEQ ID NO: 44427 - protein, 9 aa, synthetic construct
GAPGALHVR

SEQ ID NO: 44428 - protein, 9 aa, synthetic construct
GAPGALKLH

SEQ ID NO: 44429 - protein, 9 aa, synthetic construct
GAPGALKLK

SEQ ID NO: 44430 - protein, 9 aa, synthetic construct
GAPGALKVK

SEQ ID NO: 44431 - protein, 9 aa, synthetic construct
GAPGAAHVK

SEQ ID NO: 44432 - protein, 9 aa, synthetic construct
GAPGAARLH

SEQ ID NO: 44433 - protein, 9 aa, synthetic construct
GAPGAARVK

SEQ ID NO: 44434 - protein, 9 aa, synthetic construct
GAPGAAKLH

SEQ ID NO: 44435 - protein, 9 aa, synthetic construct
GAPGAIHVY

SEQ ID NO: 44436 - protein, 9 aa, synthetic construct
PLPAGVRLR

SEQ ID NO: 44437 - protein, 9 aa, synthetic construct
GAPGAIKVH

SEQ ID NO: 44438 - protein, 9 aa, synthetic construct
GAPGAIKVK

SEQ ID NO: 44439 - protein, 9 aa, synthetic construct
GAPGAGKVR

SEQ ID NO: 44440 - protein, 9 aa, synthetic construct
GAPGTVHLF

SEQ ID NO: 44441 - protein, 9 aa, synthetic construct
GAPGTVRLR

SEQ ID NO: 44442 - protein, 9 aa, synthetic construct
GAPGTVRLF

SEQ ID NO: 44443 - protein, 9 aa, synthetic construct
GAPGTVRVK

SEQ ID NO: 44444 - protein, 9 aa, synthetic construct
GAPGTVKLR

SEQ ID NO: 44445 - protein, 9 aa, synthetic construct
GAPGTVKVK

SEQ ID NO: 44446 - protein, 9 aa, synthetic construct
GAPGTLHLH

SEQ ID NO: 44447 - protein, 9 aa, synthetic construct
GAPGTLHLF

SEQ ID NO: 44448 - protein, 9 aa, synthetic construct
GAPGTLKLF

SEQ ID NO: 44449 - protein, 9 aa, synthetic construct
GAPGTLKVK

SEQ ID NO: 44450 - protein, 9 aa, synthetic construct
PLPAGVKLR

SEQ ID NO: 44451 - protein, 9 aa, synthetic construct
GAPGTIRLK

SEQ ID NO: 44452 - protein, 9 aa, synthetic construct
GAPGTIKLK

SEQ ID NO: 44453 - protein, 9 aa, synthetic construct
GAPGTIKVK

SEQ ID NO: 44454 - protein, 9 aa, synthetic construct
GAPGTGRLR

SEQ ID NO: 44455 - protein, 9 aa, synthetic construct
GAPGTGRLH

SEQ ID NO: 44456 - protein, 9 aa, synthetic construct
GAPGTGKLK

SEQ ID NO: 44457 - protein, 9 aa, synthetic construct
GAPGTGKVK

SEQ ID NO: 44458 - protein, 9 aa, synthetic construct
GAPGSVRLF

SEQ ID NO: 44459 - protein, 9 aa, synthetic construct
GAPGSVRVR

SEQ ID NO: 44460 - protein, 9 aa, synthetic construct
GAPGSVRVF

SEQ ID NO: 44461 - protein, 9 aa, synthetic construct
GAPGSLHLY

SEQ ID NO: 44462 - protein, 9 aa, synthetic construct
GAPGSLKVH

SEQ ID NO: 44463 - protein, 9 aa, synthetic construct
GAPGSLKVK

SEQ ID NO: 44464 - protein, 9 aa, synthetic construct
GAPGSARVK

SEQ ID NO: 44465 - protein, 9 aa, synthetic construct
GAPGSIRVK

SEQ ID NO: 44466 - protein, 9 aa, synthetic construct
GAPGSGHLK

SEQ ID NO: 44467 - protein, 9 aa, synthetic construct
GAPGSGRVR

SEQ ID NO: 44468 - protein, 9 aa, synthetic construct
GAPGSGKLR

SEQ ID NO: 44469 - protein, 9 aa, synthetic construct
GAPGSGKVR

SEQ ID NO: 44470 - protein, 9 aa, synthetic construct
GAPGVVRLR

SEQ ID NO: 44471 - protein, 9 aa, synthetic construct
GAPGVVRLK

SEQ ID NO: 44472 - protein, 9 aa, synthetic construct
GAPGVLRLY

SEQ ID NO: 44473 - protein, 9 aa, synthetic construct
GAPGVLRLF

SEQ ID NO: 44474 - protein, 9 aa, synthetic construct
GAPGVLRVK

SEQ ID NO: 44475 - protein, 9 aa, synthetic construct
GAPGVLKVR

SEQ ID NO: 44476 - protein, 9 aa, synthetic construct
GAPGVAKVK

SEQ ID NO: 44477 - protein, 9 aa, synthetic construct
GAPGVIKLK

SEQ ID NO: 44478 - protein, 9 aa, synthetic construct
GAPGVGRLH

SEQ ID NO: 44479 - protein, 9 aa, synthetic construct
GAPGVGRVR

SEQ ID NO: 44480 - protein, 9 aa, synthetic construct
GAPGGVRVR

SEQ ID NO: 44481 - protein, 9 aa, synthetic construct
GAPGGVKLR

SEQ ID NO: 44482 - protein, 9 aa, synthetic construct
GAPGGVKLK

SEQ ID NO: 44483 - protein, 9 aa, synthetic construct
GAPGGVKVR

SEQ ID NO: 44484 - protein, 9 aa, synthetic construct
GAPGGLKVR

SEQ ID NO: 44485 - protein, 9 aa, synthetic construct
GAPGGAHVH

SEQ ID NO: 44486 - protein, 9 aa, synthetic construct
GAPGGIRVK

SEQ ID NO: 44487 - protein, 9 aa, synthetic construct
GAPGGIKLK

SEQ ID NO: 44488 - protein, 9 aa, synthetic construct
GAPGGIKVK

SEQ ID NO: 44489 - protein, 9 aa, synthetic construct
GAPGGIKVF

SEQ ID NO: 44490 - protein, 9 aa, synthetic construct
PLPAGARLK

SEQ ID NO: 44491 - protein, 9 aa, synthetic construct
GAPGGGKLK

SEQ ID NO: 44492 - protein, 9 aa, synthetic construct
GAPGGGKVR

SEQ ID NO: 44493 - protein, 9 aa, synthetic construct
GAPAAVRLK

SEQ ID NO: 44494 - protein, 9 aa, synthetic construct
GAPAAVRVR

SEQ ID NO: 44495 - protein, 9 aa, synthetic construct
GAPAALHLY

SEQ ID NO: 44496 - protein, 9 aa, synthetic construct
GAPAALKVK

SEQ ID NO: 44497 - protein, 9 aa, synthetic construct
GAPAAIRLR

SEQ ID NO: 44498 - protein, 9 aa, synthetic construct
GAPAAIRVK

SEQ ID NO: 44499 - protein, 9 aa, synthetic construct
GAPAAIKLR

SEQ ID NO: 44500 - protein, 9 aa, synthetic construct
GAPAAIKVK

SEQ ID NO: 44501 - protein, 9 aa, synthetic construct
GAPATVRLR

SEQ ID NO: 44502 - protein, 9 aa, synthetic construct
GAPATVKLK

SEQ ID NO: 44503 - protein, 9 aa, synthetic construct
GAPATLHLY

SEQ ID NO: 44504 - protein, 9 aa, synthetic construct
GAPATLHLF

SEQ ID NO: 44505 - protein, 9 aa, synthetic construct
GAPATLRLH

SEQ ID NO: 44506 - protein, 9 aa, synthetic construct
GAPATLRLF

SEQ ID NO: 44507 - protein, 9 aa, synthetic construct
GAPATLRVH

SEQ ID NO: 44508 - protein, 9 aa, synthetic construct
GAPATLKLF

SEQ ID NO: 44509 - protein, 9 aa, synthetic construct
GAPATLKVR

SEQ ID NO: 44510 - protein, 9 aa, synthetic construct
GAPATAKLK

SEQ ID NO: 44511 - protein, 9 aa, synthetic construct
GAPATAKVR

SEQ ID NO: 44512 - protein, 9 aa, synthetic construct
GAPATIRLR

SEQ ID NO: 44513 - protein, 9 aa, synthetic construct
GAPATIRVR

SEQ ID NO: 44514 - protein, 9 aa, synthetic construct
GAPATIKLH

SEQ ID NO: 44515 - protein, 9 aa, synthetic construct
GAPATIKVK

SEQ ID NO: 44516 - protein, 9 aa, synthetic construct
PLPAGIRLK

SEQ ID NO: 44517 - protein, 9 aa, synthetic construct
GAPATGRLK

SEQ ID NO: 44518 - protein, 9 aa, synthetic construct
GAPATGKLK

SEQ ID NO: 44519 - protein, 9 aa, synthetic construct
GAPATGKVR

SEQ ID NO: 44520 - protein, 9 aa, synthetic construct
GAPATGKVH

SEQ ID NO: 44521 - protein, 9 aa, synthetic construct
GAPASVHVF

SEQ ID NO: 44522 - protein, 9 aa, synthetic construct
GAPASVRVR

SEQ ID NO: 44523 - protein, 9 aa, synthetic construct
GAPASVRVK

SEQ ID NO: 44524 - protein, 9 aa, synthetic construct
GAPASVKLR

SEQ ID NO: 44525 - protein, 9 aa, synthetic construct
PLPAGIRVK

SEQ ID NO: 44526 - protein, 9 aa, synthetic construct
GAPASLHVH

SEQ ID NO: 44527 - protein, 9 aa, synthetic construct
GAPASLHVF

SEQ ID NO: 44528 - protein, 9 aa, synthetic construct
GAPASLKLR

SEQ ID NO: 44529 - protein, 9 aa, synthetic construct
GAPASLKVK

SEQ ID NO: 44530 - protein, 9 aa, synthetic construct
GAPASIKVK

SEQ ID NO: 44531 - protein, 9 aa, synthetic construct
PLPAGIKVK

SEQ ID NO: 44532 - protein, 9 aa, synthetic construct
GAPAVVRLH

SEQ ID NO: 44533 - protein, 9 aa, synthetic construct
GAPAVVRVK

SEQ ID NO: 44534 - protein, 9 aa, synthetic construct
GAPAVVKVR

SEQ ID NO: 44535 - protein, 9 aa, synthetic construct
GAPAVLHVF

SEQ ID NO: 44536 - protein, 9 aa, synthetic construct
GAPAVLKVK

SEQ ID NO: 44537 - protein, 9 aa, synthetic construct
GAPAVAHLY

SEQ ID NO: 44538 - protein, 9 aa, synthetic construct
GAPAVAHLF

SEQ ID NO: 44539 - protein, 9 aa, synthetic construct
GAPAVARLY

SEQ ID NO: 44540 - protein, 9 aa, synthetic construct
GAPAVARLK

SEQ ID NO: 44541 - protein, 9 aa, synthetic construct
GAPAVARLF

SEQ ID NO: 44542 - protein, 9 aa, synthetic construct
GAPAVARVF

SEQ ID NO: 44543 - protein, 9 aa, synthetic construct
GAPAVAKVH

SEQ ID NO: 44544 - protein, 9 aa, synthetic construct
PLNGSGKVK

SEQ ID NO: 44545 - protein, 9 aa, synthetic construct
GAPAVIRLK

SEQ ID NO: 44546 - protein, 9 aa, synthetic construct
GAPAVIKLK

SEQ ID NO: 44547 - protein, 9 aa, synthetic construct
GAPAVGHLY

SEQ ID NO: 44548 - protein, 9 aa, synthetic construct
GAPAVGKLK

SEQ ID NO: 44549 - protein, 9 aa, synthetic construct
GAPAVGKVK

SEQ ID NO: 44550 - protein, 9 aa, synthetic construct
GAPAGVRLR

SEQ ID NO: 44551 - protein, 9 aa, synthetic construct
GAPAGVRLH

SEQ ID NO: 44552 - protein, 9 aa, synthetic construct
GAPAGVKLY

SEQ ID NO: 44553 - protein, 9 aa, synthetic construct
PLPAGGRVK

SEQ ID NO: 44554 - protein, 9 aa, synthetic construct
GAPAGLRVH

SEQ ID NO: 44555 - protein, 9 aa, synthetic construct
GAPAGLKVK

SEQ ID NO: 44556 - protein, 9 aa, synthetic construct
GAPAGAHVH

SEQ ID NO: 44557 - protein, 9 aa, synthetic construct
GAPAGARLH

SEQ ID NO: 44558 - protein, 9 aa, synthetic construct
GAPAGARVK

SEQ ID NO: 44559 - protein, 9 aa, synthetic construct
PLPAGGKLK

SEQ ID NO: 44560 - protein, 9 aa, synthetic construct
GAPAGIHVY

SEQ ID NO: 44561 - protein, 9 aa, synthetic construct
GAPAGIRVY

SEQ ID NO: 44562 - protein, 9 aa, synthetic construct
GAPAGGHVK

SEQ ID NO: 44563 - protein, 9 aa, synthetic construct
GAPAGGRLY

SEQ ID NO: 44564 - protein, 9 aa, synthetic construct
GAPAGGRLH

SEQ ID NO: 44565 - protein, 9 aa, synthetic construct
GAPAGGRVR

SEQ ID NO: 44566 - protein, 9 aa, synthetic construct
GAPAGGRVK

SEQ ID NO: 44567 - protein, 9 aa, synthetic construct
GAPAGGKVR

SEQ ID NO: 44568 - protein, 9 aa, synthetic construct
GAPAGGKVH

SEQ ID NO: 44569 - protein, 9 aa, synthetic construct
GVNGALHVR

SEQ ID NO: 44570 - protein, 9 aa, synthetic construct
GVNGALKVK

SEQ ID NO: 44571 - protein, 9 aa, synthetic construct
GVNGAARVK

SEQ ID NO: 44572 - protein, 9 aa, synthetic construct
GVNGAAKVR

SEQ ID NO: 44573 - protein, 9 aa, synthetic construct
GVNGAIRLR

SEQ ID NO: 44574 - protein, 9 aa, synthetic construct
GVNGAIRVK

SEQ ID NO: 44575 - protein, 9 aa, synthetic construct
GVNGAIKVK

SEQ ID NO: 44576 - protein, 9 aa, synthetic construct
GVNGAGKVR

SEQ ID NO: 44577 - protein, 9 aa, synthetic construct
GVNGTVRLK

SEQ ID NO: 44578 - protein, 9 aa, synthetic construct
GVNGTVKVR

SEQ ID NO: 44579 - protein, 9 aa, synthetic construct
GVNGTLRLR

SEQ ID NO: 44580 - protein, 9 aa, synthetic construct
GVNGTLRLF

SEQ ID NO: 44581 - protein, 9 aa, synthetic construct
GVNGTLKLR

SEQ ID NO: 44582 - protein, 9 aa, synthetic construct
GVNGTLKVK

SEQ ID NO: 44583 - protein, 9 aa, synthetic construct
GVNGTARVR

SEQ ID NO: 44584 - protein, 9 aa, synthetic construct
GVNGTARVK

SEQ ID NO: 44585 - protein, 9 aa, synthetic construct
GVNGTAKVR

SEQ ID NO: 44586 - protein, 9 aa, synthetic construct
GVNGTIRVY

SEQ ID NO: 44587 - protein, 9 aa, synthetic construct
GVNGTIRVK

SEQ ID NO: 44588 - protein, 9 aa, synthetic construct
GVNGTGHVR

SEQ ID NO: 44589 - protein, 9 aa, synthetic construct
GVNGTGRLK

SEQ ID NO: 44590 - protein, 9 aa, synthetic construct
GVNGTGRVH

SEQ ID NO: 44591 - protein, 9 aa, synthetic construct
GVNGTGRVK

SEQ ID NO: 44592 - protein, 9 aa, synthetic construct
GVNGTGKLK

SEQ ID NO: 44593 - protein, 9 aa, synthetic construct
GVNGTGKVK

SEQ ID NO: 44594 - protein, 9 aa, synthetic construct
GVNGSVHVY

SEQ ID NO: 44595 - protein, 9 aa, synthetic construct
GVNGSVRLR

SEQ ID NO: 44596 - protein, 9 aa, synthetic construct
GVNGSVRVK

SEQ ID NO: 44597 - protein, 9 aa, synthetic construct
GVNGSLRLF

SEQ ID NO: 44598 - protein, 9 aa, synthetic construct
GVNGSLKVY

SEQ ID NO: 44599 - protein, 9 aa, synthetic construct
GVNGSLKVK

SEQ ID NO: 44600 - protein, 9 aa, synthetic construct
GVNGSIRVK

SEQ ID NO: 44601 - protein, 9 aa, synthetic construct
GVNGSIKLR

SEQ ID NO: 44602 - protein, 9 aa, synthetic construct
GVNGSIKVR

SEQ ID NO: 44603 - protein, 9 aa, synthetic construct
GVNGSGRLH

SEQ ID NO: 44604 - protein, 9 aa, synthetic construct
GVNGSGRVK

SEQ ID NO: 44605 - protein, 9 aa, synthetic construct
GVNGSGKLR

SEQ ID NO: 44606 - protein, 9 aa, synthetic construct
GVNGSGKVR

SEQ ID NO: 44607 - protein, 9 aa, synthetic construct
GVNGVVKLR

SEQ ID NO: 44608 - protein, 9 aa, synthetic construct
GVNGVVKLK

SEQ ID NO: 44609 - protein, 9 aa, synthetic construct
GVNGVVKVR

SEQ ID NO: 44610 - protein, 9 aa, synthetic construct
GVNGVLRVY

SEQ ID NO: 44611 - protein, 9 aa, synthetic construct
GVNGVLRVR

SEQ ID NO: 44612 - protein, 9 aa, synthetic construct
GVNGVLKVR

SEQ ID NO: 44613 - protein, 9 aa, synthetic construct
GVNGVLKVK

SEQ ID NO: 44614 - protein, 9 aa, synthetic construct
PTNGALKLK

SEQ ID NO: 44615 - protein, 9 aa, synthetic construct
GVNGVIRLK

SEQ ID NO: 44616 - protein, 9 aa, synthetic construct
GVNGVIRVR

SEQ ID NO: 44617 - protein, 9 aa, synthetic construct
GVNGVIRVK

SEQ ID NO: 44618 - protein, 9 aa, synthetic construct
GVNGVIKVY

SEQ ID NO: 44619 - protein, 9 aa, synthetic construct
GVNGVGRVR

SEQ ID NO: 44620 - protein, 9 aa, synthetic construct
GVNGVGRVK

SEQ ID NO: 44621 - protein, 9 aa, synthetic construct
GVNGGVRVR

SEQ ID NO: 44622 - protein, 9 aa, synthetic construct
GVNGGVKLK

SEQ ID NO: 44623 - protein, 9 aa, synthetic construct
GVNGGVKVR

SEQ ID NO: 44624 - protein, 9 aa, synthetic construct
GVNGGLRVY

SEQ ID NO: 44625 - protein, 9 aa, synthetic construct
GVNGGLKVR

SEQ ID NO: 44626 - protein, 9 aa, synthetic construct
GVNGGARLK

SEQ ID NO: 44627 - protein, 9 aa, synthetic construct
GVNGGARVR

SEQ ID NO: 44628 - protein, 9 aa, synthetic construct
GVNGGIRVK

SEQ ID NO: 44629 - protein, 9 aa, synthetic construct
PTNGAARLR

SEQ ID NO: 44630 - protein, 9 aa, synthetic construct
GVNGGIKLK

SEQ ID NO: 44631 - protein, 9 aa, synthetic construct
GVNGGGKVR

SEQ ID NO: 44632 - protein, 9 aa, synthetic construct
GVNGGGKVK

SEQ ID NO: 44633 - protein, 9 aa, synthetic construct
GVNAAVHLY

SEQ ID NO: 44634 - protein, 9 aa, synthetic construct
GVNAAVRVR

SEQ ID NO: 44635 - protein, 9 aa, synthetic construct
GVNAAVRVK

SEQ ID NO: 44636 - protein, 9 aa, synthetic construct
GVNAALHVF

SEQ ID NO: 44637 - protein, 9 aa, synthetic construct
GVNAALRLF

SEQ ID NO: 44638 - protein, 9 aa, synthetic construct
GVNAALRVY

SEQ ID NO: 44639 - protein, 9 aa, synthetic construct
GVNAALRVR

SEQ ID NO: 44640 - protein, 9 aa, synthetic construct
GVNAALRVK

SEQ ID NO: 44641 - protein, 9 aa, synthetic construct
GVNAALKLF

SEQ ID NO: 44642 - protein, 9 aa, synthetic construct
GVNAALKVR

SEQ ID NO: 44643 - protein, 9 aa, synthetic construct
GVNAALKVH

SEQ ID NO: 44644 - protein, 9 aa, synthetic construct
GVNAALKVK

SEQ ID NO: 44645 - protein, 9 aa, synthetic construct
GVNAAARVK

SEQ ID NO: 44646 - protein, 9 aa, synthetic construct
GVNAAAKLR

SEQ ID NO: 44647 - protein, 9 aa, synthetic construct
GVNAAAKLK

SEQ ID NO: 44648 - protein, 9 aa, synthetic construct
GVNAAAKVR

SEQ ID NO: 44649 - protein, 9 aa, synthetic construct
GVNAAIRLK

SEQ ID NO: 44650 - protein, 9 aa, synthetic construct
GVNAAIKLR

SEQ ID NO: 44651 - protein, 9 aa, synthetic construct
GVNAAGRLK

SEQ ID NO: 44652 - protein, 9 aa, synthetic construct
GVNATVHLF

SEQ ID NO: 44653 - protein, 9 aa, synthetic construct
GVNATVRLH

SEQ ID NO: 44654 - protein, 9 aa, synthetic construct
GVNATVRLF

SEQ ID NO: 44655 - protein, 9 aa, synthetic construct
GVNATVKLK

SEQ ID NO: 44656 - protein, 9 aa, synthetic construct
GVNATVKVR

SEQ ID NO: 44657 - protein, 9 aa, synthetic construct
GVNATLKVY

SEQ ID NO: 44658 - protein, 9 aa, synthetic construct
GVNATLKVF

SEQ ID NO: 44659 - protein, 9 aa, synthetic construct
PLNGALRVR

SEQ ID NO: 44660 - protein, 9 aa, synthetic construct
GVNATIRVY

SEQ ID NO: 44661 - protein, 9 aa, synthetic construct
GVNATIRVH

SEQ ID NO: 44662 - protein, 9 aa, synthetic construct
GVNATIRVK

SEQ ID NO: 44663 - protein, 9 aa, synthetic construct
GVNATIKLR

SEQ ID NO: 44664 - protein, 9 aa, synthetic construct
GVNATGHLY

SEQ ID NO: 44665 - protein, 9 aa, synthetic construct
GVNATGRLK

SEQ ID NO: 44666 - protein, 9 aa, synthetic construct
GVNASVHLF

SEQ ID NO: 44667 - protein, 9 aa, synthetic construct
GVNASLHVF

SEQ ID NO: 44668 - protein, 9 aa, synthetic construct
GVNASLRLF

SEQ ID NO: 44669 - protein, 9 aa, synthetic construct
GVNASIHLH

SEQ ID NO: 44670 - protein, 9 aa, synthetic construct
GVNASIRVR

SEQ ID NO: 44671 - protein, 9 aa, synthetic construct
GVNASIRVH

SEQ ID NO: 44672 - protein, 9 aa, synthetic construct
GVNASIKLR

SEQ ID NO: 44673 - protein, 9 aa, synthetic construct
GVNASIKLK

SEQ ID NO: 44674 - protein, 9 aa, synthetic construct
GVNASIKVR

SEQ ID NO: 44675 - protein, 9 aa, synthetic construct
GVNASIKVK

SEQ ID NO: 44676 - protein, 9 aa, synthetic construct
GVNASGRVH

SEQ ID NO: 44677 - protein, 9 aa, synthetic construct
GVNASGKLK

SEQ ID NO: 44678 - protein, 9 aa, synthetic construct
GVNASGKVK

SEQ ID NO: 44679 - protein, 9 aa, synthetic construct
GVNAVVRVY

SEQ ID NO: 44680 - protein, 9 aa, synthetic construct
GVNAVVRVK

SEQ ID NO: 44681 - protein, 9 aa, synthetic construct
GVNAVVKLR

SEQ ID NO: 44682 - protein, 9 aa, synthetic construct
GVNAVVKLF

SEQ ID NO: 44683 - protein, 9 aa, synthetic construct
GVNAVVKVR

SEQ ID NO: 44684 - protein, 9 aa, synthetic construct
GVNAVLHLK

SEQ ID NO: 44685 - protein, 9 aa, synthetic construct
GVNAVLRLR

SEQ ID NO: 44686 - protein, 9 aa, synthetic construct
GVNAVLRVK

SEQ ID NO: 44687 - protein, 9 aa, synthetic construct
GVNAVLKLY

SEQ ID NO: 44688 - protein, 9 aa, synthetic construct
GVNAVLKVR

SEQ ID NO: 44689 - protein, 9 aa, synthetic construct
GVNAVLKVH

SEQ ID NO: 44690 - protein, 9 aa, synthetic construct
GVNAVLKVK

SEQ ID NO: 44691 - protein, 9 aa, synthetic construct
GVNAVAHLR

SEQ ID NO: 44692 - protein, 9 aa, synthetic construct
GVNAVARVK

SEQ ID NO: 44693 - protein, 9 aa, synthetic construct
GVNAVIRLK

SEQ ID NO: 44694 - protein, 9 aa, synthetic construct
GVNAVIRVY

SEQ ID NO: 44695 - protein, 9 aa, synthetic construct
GVNAVIRVR

SEQ ID NO: 44696 - protein, 9 aa, synthetic construct
GVNAVIRVF

SEQ ID NO: 44697 - protein, 9 aa, synthetic construct
GVNAVIKLY

SEQ ID NO: 44698 - protein, 9 aa, synthetic construct
GVNAVIKLR

SEQ ID NO: 44699 - protein, 9 aa, synthetic construct
GVNAVIKLK

SEQ ID NO: 44700 - protein, 9 aa, synthetic construct
GVNAVIKVK

SEQ ID NO: 44701 - protein, 9 aa, synthetic construct
GVNAVIKVF

SEQ ID NO: 44702 - protein, 9 aa, synthetic construct
GVNAVGRVK

SEQ ID NO: 44703 - protein, 9 aa, synthetic construct
GVNAVGKLK

SEQ ID NO: 44704 - protein, 9 aa, synthetic construct
GVNAGVRLR

SEQ ID NO: 44705 - protein, 9 aa, synthetic construct
GVNAGVKLR

SEQ ID NO: 44706 - protein, 9 aa, synthetic construct
GVNAGVKLK

SEQ ID NO: 44707 - protein, 9 aa, synthetic construct
GVNAGVKVR

SEQ ID NO: 44708 - protein, 9 aa, synthetic construct
GVNAGLRLR

SEQ ID NO: 44709 - protein, 9 aa, synthetic construct
GVNAGLRVR

SEQ ID NO: 44710 - protein, 9 aa, synthetic construct
GVNAGLRVH

SEQ ID NO: 44711 - protein, 9 aa, synthetic construct
GVNAGLRVK

SEQ ID NO: 44712 - protein, 9 aa, synthetic construct
PTNGAGKLK

SEQ ID NO: 44713 - protein, 9 aa, synthetic construct
GVNAGAKVR

SEQ ID NO: 44714 - protein, 9 aa, synthetic construct
GVNAGIHLF

SEQ ID NO: 44715 - protein, 9 aa, synthetic construct
PTNGAGKVR

SEQ ID NO: 44716 - protein, 9 aa, synthetic construct
GVNAGIKLR

SEQ ID NO: 44717 - protein, 9 aa, synthetic construct
GVNAGIKLK

SEQ ID NO: 44718 - protein, 9 aa, synthetic construct
GVNAGIKVK

SEQ ID NO: 44719 - protein, 9 aa, synthetic construct
GVNAGGRLK

SEQ ID NO: 44720 - protein, 9 aa, synthetic construct
GVNAGGRVK

SEQ ID NO: 44721 - protein, 9 aa, synthetic construct
GVNAGGKLR

SEQ ID NO: 44722 - protein, 9 aa, synthetic construct
GVNAGGKLK

SEQ ID NO: 44723 - protein, 9 aa, synthetic construct
GVNAGGKVR

SEQ ID NO: 44724 - protein, 9 aa, synthetic construct
GVQGAVRVR

SEQ ID NO: 44725 - protein, 9 aa, synthetic construct
GVQGAVRVK

SEQ ID NO: 44726 - protein, 9 aa, synthetic construct
GVQGAVKVR

SEQ ID NO: 44727 - protein, 9 aa, synthetic construct
GVQGAVKVH

SEQ ID NO: 44728 - protein, 9 aa, synthetic construct
GVQGALRVY

SEQ ID NO: 44729 - protein, 9 aa, synthetic construct
GVQGALKLK

SEQ ID NO: 44730 - protein, 9 aa, synthetic construct
GVQGAIRLY

SEQ ID NO: 44731 - protein, 9 aa, synthetic construct
GVQGAIRLK

SEQ ID NO: 44732 - protein, 9 aa, synthetic construct
GVQGAIRLF

SEQ ID NO: 44733 - protein, 9 aa, synthetic construct
GVQGAIRVK

SEQ ID NO: 44734 - protein, 9 aa, synthetic construct
GVQGAIKLK

SEQ ID NO: 44735 - protein, 9 aa, synthetic construct
GVQGAIKVR

SEQ ID NO: 44736 - protein, 9 aa, synthetic construct
GVQGAGKVR

SEQ ID NO: 44737 - protein, 9 aa, synthetic construct
PTNGTVRVR

SEQ ID NO: 44738 - protein, 9 aa, synthetic construct
PTNGTVRVK

SEQ ID NO: 44739 - protein, 9 aa, synthetic construct
GVQGTAKVR

SEQ ID NO: 44740 - protein, 9 aa, synthetic construct
GVQGTAKVK

SEQ ID NO: 44741 - protein, 9 aa, synthetic construct
GVQGTIRVK

SEQ ID NO: 44742 - protein, 9 aa, synthetic construct
GVQGTGRLR

SEQ ID NO: 44743 - protein, 9 aa, synthetic construct
GVQGTGKLK

SEQ ID NO: 44744 - protein, 9 aa, synthetic construct
GVQGSLRLF

SEQ ID NO: 44745 - protein, 9 aa, synthetic construct
GVQGSLRVH

SEQ ID NO: 44746 - protein, 9 aa, synthetic construct
GVQGSLRVF

SEQ ID NO: 44747 - protein, 9 aa, synthetic construct
GVQGSLKVR

SEQ ID NO: 44748 - protein, 9 aa, synthetic construct
GVQGSLKVK

SEQ ID NO: 44749 - protein, 9 aa, synthetic construct
GVQGSARLF

SEQ ID NO: 44750 - protein, 9 aa, synthetic construct
GVQGSIKLK

SEQ ID NO: 44751 - protein, 9 aa, synthetic construct
GVQGSGRLK

SEQ ID NO: 44752 - protein, 9 aa, synthetic construct
GVQGSGKVK

SEQ ID NO: 44753 - protein, 9 aa, synthetic construct
PTNGTLRVR

SEQ ID NO: 44754 - protein, 9 aa, synthetic construct
GVQGVVRLK

SEQ ID NO: 44755 - protein, 9 aa, synthetic construct
GVQGVVRVR

SEQ ID NO: 44756 - protein, 9 aa, synthetic construct
GVQGVVKLK

SEQ ID NO: 44757 - protein, 9 aa, synthetic construct
GVQGVVKVK

SEQ ID NO: 44758 - protein, 9 aa, synthetic construct
GVQGVLHLR

SEQ ID NO: 44759 - protein, 9 aa, synthetic construct
GVQGVLHVY

SEQ ID NO: 44760 - protein, 9 aa, synthetic construct
GVQGVLHVR

SEQ ID NO: 44761 - protein, 9 aa, synthetic construct
GVQGVLKVR

SEQ ID NO: 44762 - protein, 9 aa, synthetic construct
GVQGVARLY

SEQ ID NO: 44763 - protein, 9 aa, synthetic construct
GVQGVARLH

SEQ ID NO: 44764 - protein, 9 aa, synthetic construct
GVQGVARVY

SEQ ID NO: 44765 - protein, 9 aa, synthetic construct
GVQGVAKVR

SEQ ID NO: 44766 - protein, 9 aa, synthetic construct
GVQGVAKVK

SEQ ID NO: 44767 - protein, 9 aa, synthetic construct
GVQGVIRLR

SEQ ID NO: 44768 - protein, 9 aa, synthetic construct
GVQGVIRLK

SEQ ID NO: 44769 - protein, 9 aa, synthetic construct
GVQGVIRVY

SEQ ID NO: 44770 - protein, 9 aa, synthetic construct
GVQGVIRVK

SEQ ID NO: 44771 - protein, 9 aa, synthetic construct
GVQGVIKLY

SEQ ID NO: 44772 - protein, 9 aa, synthetic construct
GVQGVIKLR

SEQ ID NO: 44773 - protein, 9 aa, synthetic construct
GVQGVIKVY

SEQ ID NO: 44774 - protein, 9 aa, synthetic construct
GVQGVIKVK

SEQ ID NO: 44775 - protein, 9 aa, synthetic construct
GVQGVGHLY

SEQ ID NO: 44776 - protein, 9 aa, synthetic construct
GVQGVGHLF

SEQ ID NO: 44777 - protein, 9 aa, synthetic construct
GVQGVGHVR

SEQ ID NO: 44778 - protein, 9 aa, synthetic construct
GVQGVGHVF

SEQ ID NO: 44779 - protein, 9 aa, synthetic construct
PTNGTLKVK

SEQ ID NO: 44780 - protein, 9 aa, synthetic construct
GVQGGVRLR

SEQ ID NO: 44781 - protein, 9 aa, synthetic construct
GVQGGVRLK

SEQ ID NO: 44782 - protein, 9 aa, synthetic construct
GVQGGVRVK

SEQ ID NO: 44783 - protein, 9 aa, synthetic construct
GVQGGLRVF

SEQ ID NO: 44784 - protein, 9 aa, synthetic construct
GVQGGLKLY

SEQ ID NO: 44785 - protein, 9 aa, synthetic construct
GVQGGLKLR

SEQ ID NO: 44786 - protein, 9 aa, synthetic construct
GVQGGLKLF

SEQ ID NO: 44787 - protein, 9 aa, synthetic construct
GVQGGIRLK

SEQ ID NO: 44788 - protein, 9 aa, synthetic construct
PTNGTARLR

SEQ ID NO: 44789 - protein, 9 aa, synthetic construct
GVQGGIKVK

SEQ ID NO: 44790 - protein, 9 aa, synthetic construct
GVQGGGRVH

SEQ ID NO: 44791 - protein, 9 aa, synthetic construct
GVQAAVRLR

SEQ ID NO: 44792 - protein, 9 aa, synthetic construct
GVQAAVRVR

SEQ ID NO: 44793 - protein, 9 aa, synthetic construct
GVQAAVKVR

SEQ ID NO: 44794 - protein, 9 aa, synthetic construct
PTNGTARVK

SEQ ID NO: 44795 - protein, 9 aa, synthetic construct
GVQAALRVY

SEQ ID NO: 44796 - protein, 9 aa, synthetic construct
GVQAALRVK

SEQ ID NO: 44797 - protein, 9 aa, synthetic construct
GVQAALKLR

SEQ ID NO: 44798 - protein, 9 aa, synthetic construct
GVQAAARVK

SEQ ID NO: 44799 - protein, 9 aa, synthetic construct
GVQAAIHLY

SEQ ID NO: 44800 - protein, 9 aa, synthetic construct
GVQAAIRLR

SEQ ID NO: 44801 - protein, 9 aa, synthetic construct
GVQAAIRLK

SEQ ID NO: 44802 - protein, 9 aa, synthetic construct
GVQAAIRVK

SEQ ID NO: 44803 - protein, 9 aa, synthetic construct
GVQAAIKLR

SEQ ID NO: 44804 - protein, 9 aa, synthetic construct
GVQAAGRLR

SEQ ID NO: 44805 - protein, 9 aa, synthetic construct
GVQAAGRLK

SEQ ID NO: 44806 - protein, 9 aa, synthetic construct
GVQAAGRVY

SEQ ID NO: 44807 - protein, 9 aa, synthetic construct
GVQAAGRVR

SEQ ID NO: 44808 - protein, 9 aa, synthetic construct
GVQAAGKVR

SEQ ID NO: 44809 - protein, 9 aa, synthetic construct
GVQATVRLR

SEQ ID NO: 44810 - protein, 9 aa, synthetic construct
GVQATVKVK

SEQ ID NO: 44811 - protein, 9 aa, synthetic construct
GVQATVKVF

SEQ ID NO: 44812 - protein, 9 aa, synthetic construct
GVQATLRVK

SEQ ID NO: 44813 - protein, 9 aa, synthetic construct
GVQATLKVH

SEQ ID NO: 44814 - protein, 9 aa, synthetic construct
GVQATLKVF

SEQ ID NO: 44815 - protein, 9 aa, synthetic construct
GVQATARLR

SEQ ID NO: 44816 - protein, 9 aa, synthetic construct
GVQATARVF

SEQ ID NO: 44817 - protein, 9 aa, synthetic construct
GVQATIRLH

SEQ ID NO: 44818 - protein, 9 aa, synthetic construct
GVQATIRLF

SEQ ID NO: 44819 - protein, 9 aa, synthetic construct
GVQATIKLF

SEQ ID NO: 44820 - protein, 9 aa, synthetic construct
GVQATIKVR

SEQ ID NO: 44821 - protein, 9 aa, synthetic construct
GVQASVHVF

SEQ ID NO: 44822 - protein, 9 aa, synthetic construct
PTNGTIRVR

SEQ ID NO: 44823 - protein, 9 aa, synthetic construct
GVQASVRLR

SEQ ID NO: 44824 - protein, 9 aa, synthetic construct
GVQASVKVK

SEQ ID NO: 44825 - protein, 9 aa, synthetic construct
GVQASLRLR

SEQ ID NO: 44826 - protein, 9 aa, synthetic construct
GVQASLRVR

SEQ ID NO: 44827 - protein, 9 aa, synthetic construct
GVQASIRVR

SEQ ID NO: 44828 - protein, 9 aa, synthetic construct
GVQASIKVR

SEQ ID NO: 44829 - protein, 9 aa, synthetic construct
GVQASIKVK

SEQ ID NO: 44830 - protein, 9 aa, synthetic construct
PTNGTIKVK

SEQ ID NO: 44831 - protein, 9 aa, synthetic construct
GVQASGKVY

SEQ ID NO: 44832 - protein, 9 aa, synthetic construct
GVQASGKVK

SEQ ID NO: 44833 - protein, 9 aa, synthetic construct
GVQAVVHLF

SEQ ID NO: 44834 - protein, 9 aa, synthetic construct
GVQAVVRLF

SEQ ID NO: 44835 - protein, 9 aa, synthetic construct
GVQAVVRVK

SEQ ID NO: 44836 - protein, 9 aa, synthetic construct
GVQAVVKLR

SEQ ID NO: 44837 - protein, 9 aa, synthetic construct
GVQAVVKLH

SEQ ID NO: 44838 - protein, 9 aa, synthetic construct
GVQAVVKLK

SEQ ID NO: 44839 - protein, 9 aa, synthetic construct
GVQAVVKVY

SEQ ID NO: 44840 - protein, 9 aa, synthetic construct
GVQAVVKVK

SEQ ID NO: 44841 - protein, 9 aa, synthetic construct
GVQAVVKVF

SEQ ID NO: 44842 - protein, 9 aa, synthetic construct
GVQAVLKLK

SEQ ID NO: 44843 - protein, 9 aa, synthetic construct
GVQAVLKVR

SEQ ID NO: 44844 - protein, 9 aa, synthetic construct
GVQAVLKVH

SEQ ID NO: 44845 - protein, 9 aa, synthetic construct
GVQAVLKVK

SEQ ID NO: 44846 - protein, 9 aa, synthetic construct
GVQAVAKLK

SEQ ID NO: 44847 - protein, 9 aa, synthetic construct
GVQAVAKLF

SEQ ID NO: 44848 - protein, 9 aa, synthetic construct
GVQAVIHLF

SEQ ID NO: 44849 - protein, 9 aa, synthetic construct
GVQAVIHVY

SEQ ID NO: 44850 - protein, 9 aa, synthetic construct
GVQAVIHVR

SEQ ID NO: 44851 - protein, 9 aa, synthetic construct
GVQAVIRVY

SEQ ID NO: 44852 - protein, 9 aa, synthetic construct
GVQAVIRVR

SEQ ID NO: 44853 - protein, 9 aa, synthetic construct
GVQAVIKLH

SEQ ID NO: 44854 - protein, 9 aa, synthetic construct
GVQAVIKLK

SEQ ID NO: 44855 - protein, 9 aa, synthetic construct
GVQAVIKVR

SEQ ID NO: 44856 - protein, 9 aa, synthetic construct
GVQAVIKVK

SEQ ID NO: 44857 - protein, 9 aa, synthetic construct
GVQAVIKVF

SEQ ID NO: 44858 - protein, 9 aa, synthetic construct
PTNGTGRLK

SEQ ID NO: 44859 - protein, 9 aa, synthetic construct
GVQAVGRLR

SEQ ID NO: 44860 - protein, 9 aa, synthetic construct
GVQAVGRLH

SEQ ID NO: 44861 - protein, 9 aa, synthetic construct
GVQAVGRLK

SEQ ID NO: 44862 - protein, 9 aa, synthetic construct
GVQAVGRVR

SEQ ID NO: 44863 - protein, 9 aa, synthetic construct
GVQAVGKLK

SEQ ID NO: 44864 - protein, 9 aa, synthetic construct
GVQAGVRVK

SEQ ID NO: 44865 - protein, 9 aa, synthetic construct
PTNGTGRVK

SEQ ID NO: 44866 - protein, 9 aa, synthetic construct
GVQAGLKVR

SEQ ID NO: 44867 - protein, 9 aa, synthetic construct
GVQAGARLH

SEQ ID NO: 44868 - protein, 9 aa, synthetic construct
GVQAGARLF

SEQ ID NO: 44869 - protein, 9 aa, synthetic construct
GVQAGARVH

SEQ ID NO: 44870 - protein, 9 aa, synthetic construct
GVQAGIRLF

SEQ ID NO: 44871 - protein, 9 aa, synthetic construct
GVQAGIRVY

SEQ ID NO: 44872 - protein, 9 aa, synthetic construct
GVQAGIKLR

SEQ ID NO: 44873 - protein, 9 aa, synthetic construct
GVQAGIKLH

SEQ ID NO: 44874 - protein, 9 aa, synthetic construct
PTNGTGKVK

SEQ ID NO: 44875 - protein, 9 aa, synthetic construct
GVQAGGRLH

SEQ ID NO: 44876 - protein, 9 aa, synthetic construct
GVQAGGRVY

SEQ ID NO: 44877 - protein, 9 aa, synthetic construct
GVQAGGRVH

SEQ ID NO: 44878 - protein, 9 aa, synthetic construct
GVQAGGRVK

SEQ ID NO: 44879 - protein, 9 aa, synthetic construct
GVQAGGKVK

SEQ ID NO: 44880 - protein, 9 aa, synthetic construct
GVPGAVKVR

SEQ ID NO: 44881 - protein, 9 aa, synthetic construct
GVPGAARVK

SEQ ID NO: 44882 - protein, 9 aa, synthetic construct
GVPGAAKVR

SEQ ID NO: 44883 - protein, 9 aa, synthetic construct
GVPGAIRVR

SEQ ID NO: 44884 - protein, 9 aa, synthetic construct
GVPGAIRVF

SEQ ID NO: 44885 - protein, 9 aa, synthetic construct
GVPGAIKLR

SEQ ID NO: 44886 - protein, 9 aa, synthetic construct
GVPGAIKVK

SEQ ID NO: 44887 - protein, 9 aa, synthetic construct
GVPGAGKLR

SEQ ID NO: 44888 - protein, 9 aa, synthetic construct
GVPGAGKLK

SEQ ID NO: 44889 - protein, 9 aa, synthetic construct
PTNGSVRVR

SEQ ID NO: 44890 - protein, 9 aa, synthetic construct
GVPGTVRLY

SEQ ID NO: 44891 - protein, 9 aa, synthetic construct
GVPGTVRLK

SEQ ID NO: 44892 - protein, 9 aa, synthetic construct
GVPGTVRLF

SEQ ID NO: 44893 - protein, 9 aa, synthetic construct
GVPGTLHLH

SEQ ID NO: 44894 - protein, 9 aa, synthetic construct
GVPGTLHLF

SEQ ID NO: 44895 - protein, 9 aa, synthetic construct
GVPGTLKVK

SEQ ID NO: 44896 - protein, 9 aa, synthetic construct
GVPGTARLY

SEQ ID NO: 44897 - protein, 9 aa, synthetic construct
GVPGTARVK

SEQ ID NO: 44898 - protein, 9 aa, synthetic construct
GVPGTAKLK

SEQ ID NO: 44899 - protein, 9 aa, synthetic construct
GVPGTIRLK

SEQ ID NO: 44900 - protein, 9 aa, synthetic construct
GVPGTIRVF

SEQ ID NO: 44901 - protein, 9 aa, synthetic construct
GVPGTIKLK

SEQ ID NO: 44902 - protein, 9 aa, synthetic construct
GVPGTIKVY

SEQ ID NO: 44903 - protein, 9 aa, synthetic construct
GVPGTIKVR

SEQ ID NO: 44904 - protein, 9 aa, synthetic construct
GVPGTIKVK

SEQ ID NO: 44905 - protein, 9 aa, synthetic construct
GVPGTGRLK

SEQ ID NO: 44906 - protein, 9 aa, synthetic construct
GVPGTGKLK

SEQ ID NO: 44907 - protein, 9 aa, synthetic construct
GVPGSVRVR

SEQ ID NO: 44908 - protein, 9 aa, synthetic construct
GVPGSVRVK

SEQ ID NO: 44909 - protein, 9 aa, synthetic construct
GVPGSLRVR

SEQ ID NO: 44910 - protein, 9 aa, synthetic construct
GVPGSLKVY

SEQ ID NO: 44911 - protein, 9 aa, synthetic construct
GVPGSLKVH

SEQ ID NO: 44912 - protein, 9 aa, synthetic construct
GVPGSAKLR

SEQ ID NO: 44913 - protein, 9 aa, synthetic construct
GVPGSAKVK

SEQ ID NO: 44914 - protein, 9 aa, synthetic construct
GVPGSIHLF

SEQ ID NO: 44915 - protein, 9 aa, synthetic construct
GVPGSIRLH

SEQ ID NO: 44916 - protein, 9 aa, synthetic construct
PTNGSLRVR

SEQ ID NO: 44917 - protein, 9 aa, synthetic construct
GVPGVVRVR

SEQ ID NO: 44918 - protein, 9 aa, synthetic construct
GVPGVVRVF

SEQ ID NO: 44919 - protein, 9 aa, synthetic construct
GVPGVLHLY

SEQ ID NO: 44920 - protein, 9 aa, synthetic construct
GVPGVLHLK

SEQ ID NO: 44921 - protein, 9 aa, synthetic construct
GVPGVLRVR

SEQ ID NO: 44922 - protein, 9 aa, synthetic construct
GVPGVLKLY

SEQ ID NO: 44923 - protein, 9 aa, synthetic construct
GVPGVLKLK

SEQ ID NO: 44924 - protein, 9 aa, synthetic construct
GVPGVLKLF

SEQ ID NO: 44925 - protein, 9 aa, synthetic construct
GVPGVLKVR

SEQ ID NO: 44926 - protein, 9 aa, synthetic construct
GVPGVARVY

SEQ ID NO: 44927 - protein, 9 aa, synthetic construct
GVPGVIHLY

SEQ ID NO: 44928 - protein, 9 aa, synthetic construct
GVPGVIRVR

SEQ ID NO: 44929 - protein, 9 aa, synthetic construct
GVPGVIRVK

SEQ ID NO: 44930 - protein, 9 aa, synthetic construct
GVPGVIRVF

SEQ ID NO: 44931 - protein, 9 aa, synthetic construct
GVPGVIKLK

SEQ ID NO: 44932 - protein, 9 aa, synthetic construct
GVPGVGKLK

SEQ ID NO: 44933 - protein, 9 aa, synthetic construct
GVPGGVHLR

SEQ ID NO: 44934 - protein, 9 aa, synthetic construct
GVPGGVHLK

SEQ ID NO: 44935 - protein, 9 aa, synthetic construct
GVPGGVRLF

SEQ ID NO: 44936 - protein, 9 aa, synthetic construct
GVPGGVRVH

SEQ ID NO: 44937 - protein, 9 aa, synthetic construct
GVPGGVRVK

SEQ ID NO: 44938 - protein, 9 aa, synthetic construct
GVPGGLRLH

SEQ ID NO: 44939 - protein, 9 aa, synthetic construct
GVPGGLKLF

SEQ ID NO: 44940 - protein, 9 aa, synthetic construct
GVPGGLKVK

SEQ ID NO: 44941 - protein, 9 aa, synthetic construct
GVPGGAHLY

SEQ ID NO: 44942 - protein, 9 aa, synthetic construct
GVPGGAHLR

SEQ ID NO: 44943 - protein, 9 aa, synthetic construct
GVPGGAKLH

SEQ ID NO: 44944 - protein, 9 aa, synthetic construct
GVPGGIHLH

SEQ ID NO: 44945 - protein, 9 aa, synthetic construct
GVPGGGHLK

SEQ ID NO: 44946 - protein, 9 aa, synthetic construct
GVPGGGRVH

SEQ ID NO: 44947 - protein, 9 aa, synthetic construct
GVPGGGRVK

SEQ ID NO: 44948 - protein, 9 aa, synthetic construct
GVPAAVRLK

SEQ ID NO: 44949 - protein, 9 aa, synthetic construct
GVPAAVKVK

SEQ ID NO: 44950 - protein, 9 aa, synthetic construct
GVPAALRLF

SEQ ID NO: 44951 - protein, 9 aa, synthetic construct
GVPAALKVR

SEQ ID NO: 44952 - protein, 9 aa, synthetic construct
GVPAAIRVK

SEQ ID NO: 44953 - protein, 9 aa, synthetic construct
GVPAAGRLK

SEQ ID NO: 44954 - protein, 9 aa, synthetic construct
GVPAAGRVR

SEQ ID NO: 44955 - protein, 9 aa, synthetic construct
GVPAAGRVK

SEQ ID NO: 44956 - protein, 9 aa, synthetic construct
GVPAAGKVR

SEQ ID NO: 44957 - protein, 9 aa, synthetic construct
GVPAAGKVK

SEQ ID NO: 44958 - protein, 9 aa, synthetic construct
GVPATVHVR

SEQ ID NO: 44959 - protein, 9 aa, synthetic construct
GVPATVRVY

SEQ ID NO: 44960 - protein, 9 aa, synthetic construct
GVPATVRVR

SEQ ID NO: 44961 - protein, 9 aa, synthetic construct
GVPATVRVK

SEQ ID NO: 44962 - protein, 9 aa, synthetic construct
GVPATVKVK

SEQ ID NO: 44963 - protein, 9 aa, synthetic construct
GVPATLRLH

SEQ ID NO: 44964 - protein, 9 aa, synthetic construct
GVPATLRLF

SEQ ID NO: 44965 - protein, 9 aa, synthetic construct
GVPATLKLH

SEQ ID NO: 44966 - protein, 9 aa, synthetic construct
GVPATLKVH

SEQ ID NO: 44967 - protein, 9 aa, synthetic construct
GVPATARLR

SEQ ID NO: 44968 - protein, 9 aa, synthetic construct
GVPATARVR

SEQ ID NO: 44969 - protein, 9 aa, synthetic construct
GVPATARVH

SEQ ID NO: 44970 - protein, 9 aa, synthetic construct
GVPATAKLR

SEQ ID NO: 44971 - protein, 9 aa, synthetic construct
GVPATAKLK

SEQ ID NO: 44972 - protein, 9 aa, synthetic construct
PLNGALRVF

SEQ ID NO: 44973 - protein, 9 aa, synthetic construct
GVPATIRLF

SEQ ID NO: 44974 - protein, 9 aa, synthetic construct
GVPATIRVH

SEQ ID NO: 44975 - protein, 9 aa, synthetic construct
GVPATIRVF

SEQ ID NO: 44976 - protein, 9 aa, synthetic construct
GVPATIKLY

SEQ ID NO: 44977 - protein, 9 aa, synthetic construct
GVPATIKLF

SEQ ID NO: 44978 - protein, 9 aa, synthetic construct
GVPATGKLR

SEQ ID NO: 44979 - protein, 9 aa, synthetic construct
GVPATGKLK

SEQ ID NO: 44980 - protein, 9 aa, synthetic construct
GVPASVHVY

SEQ ID NO: 44981 - protein, 9 aa, synthetic construct
GVPASVRLK

SEQ ID NO: 44982 - protein, 9 aa, synthetic construct
GVPASVKLK

SEQ ID NO: 44983 - protein, 9 aa, synthetic construct
GVPASVKVR

SEQ ID NO: 44984 - protein, 9 aa, synthetic construct
PTNGSIRVK

SEQ ID NO: 44985 - protein, 9 aa, synthetic construct
GVPASLHVY

SEQ ID NO: 44986 - protein, 9 aa, synthetic construct
GVPASLHVH

SEQ ID NO: 44987 - protein, 9 aa, synthetic construct
GVPASLRLF

SEQ ID NO: 44988 - protein, 9 aa, synthetic construct
GVPASLRVH

SEQ ID NO: 44989 - protein, 9 aa, synthetic construct
GVPASLKLY

SEQ ID NO: 44990 - protein, 9 aa, synthetic construct
GVPASLKVH

SEQ ID NO: 44991 - protein, 9 aa, synthetic construct
GVPASIHVF

SEQ ID NO: 44992 - protein, 9 aa, synthetic construct
GVPASIRLF

SEQ ID NO: 44993 - protein, 9 aa, synthetic construct
GVPASIRVR

SEQ ID NO: 44994 - protein, 9 aa, synthetic construct
GVPASIRVH

SEQ ID NO: 44995 - protein, 9 aa, synthetic construct
GVPASIRVK

SEQ ID NO: 44996 - protein, 9 aa, synthetic construct
PTNGSIKVK

SEQ ID NO: 44997 - protein, 9 aa, synthetic construct
GVPASGRVK

SEQ ID NO: 44998 - protein, 9 aa, synthetic construct
GVPASGKLR

SEQ ID NO: 44999 - protein, 9 aa, synthetic construct
GVPAVVRVY

SEQ ID NO: 45000 - protein, 9 aa, synthetic construct
GVPAVVRVR

SEQ ID NO: 45001 - protein, 9 aa, synthetic construct
GVPAVVRVF

SEQ ID NO: 45002 - protein, 9 aa, synthetic construct
GVPAVVKVR

SEQ ID NO: 45003 - protein, 9 aa, synthetic construct
GVPAVLKVR

SEQ ID NO: 45004 - protein, 9 aa, synthetic construct
GVPAVLKVK

SEQ ID NO: 45005 - protein, 9 aa, synthetic construct
GVPAVAHLY

SEQ ID NO: 45006 - protein, 9 aa, synthetic construct
GVPAVAHLK

SEQ ID NO: 45007 - protein, 9 aa, synthetic construct
GVPAVAHLF

SEQ ID NO: 45008 - protein, 9 aa, synthetic construct
GVPAVAHVY

SEQ ID NO: 45009 - protein, 9 aa, synthetic construct
GVPAVAHVF

SEQ ID NO: 45010 - protein, 9 aa, synthetic construct
GVPAVARVY

SEQ ID NO: 45011 - protein, 9 aa, synthetic construct
GVPAVARVH

SEQ ID NO: 45012 - protein, 9 aa, synthetic construct
GVPAVARVF

SEQ ID NO: 45013 - protein, 9 aa, synthetic construct
GVPAVAKVY

SEQ ID NO: 45014 - protein, 9 aa, synthetic construct
PLNGVLRLK

SEQ ID NO: 45015 - protein, 9 aa, synthetic construct
GVPAVIRLK

SEQ ID NO: 45016 - protein, 9 aa, synthetic construct
GVPAVIKLR

SEQ ID NO: 45017 - protein, 9 aa, synthetic construct
GVPAVIKLK

SEQ ID NO: 45018 - protein, 9 aa, synthetic construct
GVPAVIKVF

SEQ ID NO: 45019 - protein, 9 aa, synthetic construct
GVPAVGHVR

SEQ ID NO: 45020 - protein, 9 aa, synthetic construct
PTNGSGRVK

SEQ ID NO: 45021 - protein, 9 aa, synthetic construct
GVPAGLHLH

SEQ ID NO: 45022 - protein, 9 aa, synthetic construct
GVPAGLRVF

SEQ ID NO: 45023 - protein, 9 aa, synthetic construct
GVPAGLKLH

SEQ ID NO: 45024 - protein, 9 aa, synthetic construct
PTNGSGKLK

SEQ ID NO: 45025 - protein, 9 aa, synthetic construct
GVPAGAKVR

SEQ ID NO: 45026 - protein, 9 aa, synthetic construct
GVPAGIRVY

SEQ ID NO: 45027 - protein, 9 aa, synthetic construct
GVPAGIKLK

SEQ ID NO: 45028 - protein, 9 aa, synthetic construct
GVPAGGRLR

SEQ ID NO: 45029 - protein, 9 aa, synthetic construct
GVPAGGKLR

SEQ ID NO: 45030 - protein, 9 aa, synthetic construct
GVPAGGKLK

SEQ ID NO: 45031 - protein, 9 aa, synthetic construct
GINGAVRLR

SEQ ID NO: 45032 - protein, 9 aa, synthetic construct
GINGAVRLF

SEQ ID NO: 45033 - protein, 9 aa, synthetic construct
GINGAVRVR

SEQ ID NO: 45034 - protein, 9 aa, synthetic construct
GINGALHVK

SEQ ID NO: 45035 - protein, 9 aa, synthetic construct
GINGAARVR

SEQ ID NO: 45036 - protein, 9 aa, synthetic construct
GINGAARVK

SEQ ID NO: 45037 - protein, 9 aa, synthetic construct
GINGAIKLR

SEQ ID NO: 45038 - protein, 9 aa, synthetic construct
GINGAIKVK

SEQ ID NO: 45039 - protein, 9 aa, synthetic construct
PTNGVVRLK

SEQ ID NO: 45040 - protein, 9 aa, synthetic construct
GINGAGKLK

SEQ ID NO: 45041 - protein, 9 aa, synthetic construct
GINGTVRVK

SEQ ID NO: 45042 - protein, 9 aa, synthetic construct
GINGTLRLF

SEQ ID NO: 45043 - protein, 9 aa, synthetic construct
GINGTLRVF

SEQ ID NO: 45044 - protein, 9 aa, synthetic construct
GINGTLKLR

SEQ ID NO: 45045 - protein, 9 aa, synthetic construct
GINGTLKVK

SEQ ID NO: 45046 - protein, 9 aa, synthetic construct
GINGTLKVF

SEQ ID NO: 45047 - protein, 9 aa, synthetic construct
GINGTARLR

SEQ ID NO: 45048 - protein, 9 aa, synthetic construct
GINGTARLK

SEQ ID NO: 45049 - protein, 9 aa, synthetic construct
GINGTARVR

SEQ ID NO: 45050 - protein, 9 aa, synthetic construct
GINGTARVK

SEQ ID NO: 45051 - protein, 9 aa, synthetic construct
PTNGVVKLK

SEQ ID NO: 45052 - protein, 9 aa, synthetic construct
GINGTAKVR

SEQ ID NO: 45053 - protein, 9 aa, synthetic construct
GINGTAKVK

SEQ ID NO: 45054 - protein, 9 aa, synthetic construct
GINGTIHLF

SEQ ID NO: 45055 - protein, 9 aa, synthetic construct
GINGTIRVY

SEQ ID NO: 45056 - protein, 9 aa, synthetic construct
GINGTIRVK

SEQ ID NO: 45057 - protein, 9 aa, synthetic construct
GINGTIKLK

SEQ ID NO: 45058 - protein, 9 aa, synthetic construct
GINGTIKVY

SEQ ID NO: 45059 - protein, 9 aa, synthetic construct
GINGTGHVR

SEQ ID NO: 45060 - protein, 9 aa, synthetic construct
GINGTGRLK

SEQ ID NO: 45061 - protein, 9 aa, synthetic construct
GINGTGRVH

SEQ ID NO: 45062 - protein, 9 aa, synthetic construct
GINGTGRVK

SEQ ID NO: 45063 - protein, 9 aa, synthetic construct
GINGTGKVR

SEQ ID NO: 45064 - protein, 9 aa, synthetic construct
GINGSLKVR

SEQ ID NO: 45065 - protein, 9 aa, synthetic construct
PLNGVLRVF

SEQ ID NO: 45066 - protein, 9 aa, synthetic construct
GINGSIRLK

SEQ ID NO: 45067 - protein, 9 aa, synthetic construct
GINGSIRVK

SEQ ID NO: 45068 - protein, 9 aa, synthetic construct
GINGSIKVK

SEQ ID NO: 45069 - protein, 9 aa, synthetic construct
GINGSGRLK

SEQ ID NO: 45070 - protein, 9 aa, synthetic construct
GINGSGRVK

SEQ ID NO: 45071 - protein, 9 aa, synthetic construct
GINGVVRLF

SEQ ID NO: 45072 - protein, 9 aa, synthetic construct
PTNGVLRVH

SEQ ID NO: 45073 - protein, 9 aa, synthetic construct
GINGVLKLK

SEQ ID NO: 45074 - protein, 9 aa, synthetic construct
GINGVLKVR

SEQ ID NO: 45075 - protein, 9 aa, synthetic construct
GINGVIHLY

SEQ ID NO: 45076 - protein, 9 aa, synthetic construct
GINGVIRLH

SEQ ID NO: 45077 - protein, 9 aa, synthetic construct
GINGVIRVY

SEQ ID NO: 45078 - protein, 9 aa, synthetic construct
GINGVIRVK

SEQ ID NO: 45079 - protein, 9 aa, synthetic construct
GINGVIKLR

SEQ ID NO: 45080 - protein, 9 aa, synthetic construct
GINGVIKVF

SEQ ID NO: 45081 - protein, 9 aa, synthetic construct
GINGVGHLY

SEQ ID NO: 45082 - protein, 9 aa, synthetic construct
PTNGVLKVK

SEQ ID NO: 45083 - protein, 9 aa, synthetic construct
GINGGVRLR

SEQ ID NO: 45084 - protein, 9 aa, synthetic construct
GINGGVKLR

SEQ ID NO: 45085 - protein, 9 aa, synthetic construct
GINGGVKLK

SEQ ID NO: 45086 - protein, 9 aa, synthetic construct
GINGGLRVH

SEQ ID NO: 45087 - protein, 9 aa, synthetic construct
GINGGLKVR

SEQ ID NO: 45088 - protein, 9 aa, synthetic construct
GINGGLKVK

SEQ ID NO: 45089 - protein, 9 aa, synthetic construct
GINGGAKLK

SEQ ID NO: 45090 - protein, 9 aa, synthetic construct
PLNGVLKLH

SEQ ID NO: 45091 - protein, 9 aa, synthetic construct
GINGGIRLR

SEQ ID NO: 45092 - protein, 9 aa, synthetic construct
GINGGIRLK

SEQ ID NO: 45093 - protein, 9 aa, synthetic construct
GINGGIRVK

SEQ ID NO: 45094 - protein, 9 aa, synthetic construct
GINGGIKLK

SEQ ID NO: 45095 - protein, 9 aa, synthetic construct
GINGGGHVF

SEQ ID NO: 45096 - protein, 9 aa, synthetic construct
GINGGGRLR

SEQ ID NO: 45097 - protein, 9 aa, synthetic construct
GINGGGRLK

SEQ ID NO: 45098 - protein, 9 aa, synthetic construct
GINGGGKLR

SEQ ID NO: 45099 - protein, 9 aa, synthetic construct
GINGGGKVR

SEQ ID NO: 45100 - protein, 9 aa, synthetic construct
GINGGGKVH

SEQ ID NO: 45101 - protein, 9 aa, synthetic construct
GINAAVRVR

SEQ ID NO: 45102 - protein, 9 aa, synthetic construct
PLNGVLKLK

SEQ ID NO: 45103 - protein, 9 aa, synthetic construct
GINAALKVK

SEQ ID NO: 45104 - protein, 9 aa, synthetic construct
GINAAARVK

SEQ ID NO: 45105 - protein, 9 aa, synthetic construct
GINAAAKLK

SEQ ID NO: 45106 - protein, 9 aa, synthetic construct
GINAAIKLR

SEQ ID NO: 45107 - protein, 9 aa, synthetic construct
GINAAGRLK

SEQ ID NO: 45108 - protein, 9 aa, synthetic construct
GINAAGKLK

SEQ ID NO: 45109 - protein, 9 aa, synthetic construct
GINAAGKVK

SEQ ID NO: 45110 - protein, 9 aa, synthetic construct
GINATLHLR

SEQ ID NO: 45111 - protein, 9 aa, synthetic construct
GINATLRLF

SEQ ID NO: 45112 - protein, 9 aa, synthetic construct
GINATARLR

SEQ ID NO: 45113 - protein, 9 aa, synthetic construct
GINATARVR

SEQ ID NO: 45114 - protein, 9 aa, synthetic construct
GINATAKLR

SEQ ID NO: 45115 - protein, 9 aa, synthetic construct
GINATAKLK

SEQ ID NO: 45116 - protein, 9 aa, synthetic construct
GINATIRVR

SEQ ID NO: 45117 - protein, 9 aa, synthetic construct
GINATIRVK

SEQ ID NO: 45118 - protein, 9 aa, synthetic construct
GINATIKVK

SEQ ID NO: 45119 - protein, 9 aa, synthetic construct
GINATGHVY

SEQ ID NO: 45120 - protein, 9 aa, synthetic construct
GINATGRLK

SEQ ID NO: 45121 - protein, 9 aa, synthetic construct
GINATGRVK

SEQ ID NO: 45122 - protein, 9 aa, synthetic construct
GINATGKLK

SEQ ID NO: 45123 - protein, 9 aa, synthetic construct
GINATGKVK

SEQ ID NO: 45124 - protein, 9 aa, synthetic construct
GINASVRLF

SEQ ID NO: 45125 - protein, 9 aa, synthetic construct
GINASVRVR

SEQ ID NO: 45126 - protein, 9 aa, synthetic construct
GINASLHLR

SEQ ID NO: 45127 - protein, 9 aa, synthetic construct
PTNGVIRVF

SEQ ID NO: 45128 - protein, 9 aa, synthetic construct
GINASLRLY

SEQ ID NO: 45129 - protein, 9 aa, synthetic construct
GINASLRLF

SEQ ID NO: 45130 - protein, 9 aa, synthetic construct
GINASLRVH

SEQ ID NO: 45131 - protein, 9 aa, synthetic construct
GINASLKLR

SEQ ID NO: 45132 - protein, 9 aa, synthetic construct
GINASLKVK

SEQ ID NO: 45133 - protein, 9 aa, synthetic construct
PTNGVIKLR

SEQ ID NO: 45134 - protein, 9 aa, synthetic construct
GINASARLH

SEQ ID NO: 45135 - protein, 9 aa, synthetic construct
GINASARLF

SEQ ID NO: 45136 - protein, 9 aa, synthetic construct
GINASAKLY

SEQ ID NO: 45137 - protein, 9 aa, synthetic construct
GINASIHLR

SEQ ID NO: 45138 - protein, 9 aa, synthetic construct
GINASIHLF

SEQ ID NO: 45139 - protein, 9 aa, synthetic construct
GINASIRLR

SEQ ID NO: 45140 - protein, 9 aa, synthetic construct
GINASIRVK

SEQ ID NO: 45141 - protein, 9 aa, synthetic construct
GINASIKVY

SEQ ID NO: 45142 - protein, 9 aa, synthetic construct
GINASIKVR

SEQ ID NO: 45143 - protein, 9 aa, synthetic construct
GINASIKVK

SEQ ID NO: 45144 - protein, 9 aa, synthetic construct
GINASGRVR

SEQ ID NO: 45145 - protein, 9 aa, synthetic construct
GINASGRVH

SEQ ID NO: 45146 - protein, 9 aa, synthetic construct
GINASGKVR

SEQ ID NO: 45147 - protein, 9 aa, synthetic construct
GINAVVHLF

SEQ ID NO: 45148 - protein, 9 aa, synthetic construct
GINAVVRLR

SEQ ID NO: 45149 - protein, 9 aa, synthetic construct
GINAVVRVR

SEQ ID NO: 45150 - protein, 9 aa, synthetic construct
GINAVLKVK

SEQ ID NO: 45151 - protein, 9 aa, synthetic construct
GINAVAHLY

SEQ ID NO: 45152 - protein, 9 aa, synthetic construct
GINAVAHLR

SEQ ID NO: 45153 - protein, 9 aa, synthetic construct
GINAVAHVF

SEQ ID NO: 45154 - protein, 9 aa, synthetic construct
GINAVAKVY

SEQ ID NO: 45155 - protein, 9 aa, synthetic construct
GINAVIRLH

SEQ ID NO: 45156 - protein, 9 aa, synthetic construct
GINAVIRLK

SEQ ID NO: 45157 - protein, 9 aa, synthetic construct
GINAVIRVY

SEQ ID NO: 45158 - protein, 9 aa, synthetic construct
GINAVIKLY

SEQ ID NO: 45159 - protein, 9 aa, synthetic construct
GINAVIKLR

SEQ ID NO: 45160 - protein, 9 aa, synthetic construct
GINAVGRLH

SEQ ID NO: 45161 - protein, 9 aa, synthetic construct
GINAVGRLK

SEQ ID NO: 45162 - protein, 9 aa, synthetic construct
GINAVGRVK

SEQ ID NO: 45163 - protein, 9 aa, synthetic construct
GINAVGKVK

SEQ ID NO: 45164 - protein, 9 aa, synthetic construct
GINAGVKLR

SEQ ID NO: 45165 - protein, 9 aa, synthetic construct
GINAGVKVR

SEQ ID NO: 45166 - protein, 9 aa, synthetic construct
GINAGVKVK

SEQ ID NO: 45167 - protein, 9 aa, synthetic construct
GINAGLRVK

SEQ ID NO: 45168 - protein, 9 aa, synthetic construct
GINAGLKVK

SEQ ID NO: 45169 - protein, 9 aa, synthetic construct
GINAGARLH

SEQ ID NO: 45170 - protein, 9 aa, synthetic construct
GINAGARVR

SEQ ID NO: 45171 - protein, 9 aa, synthetic construct
PTNGVGKLK

SEQ ID NO: 45172 - protein, 9 aa, synthetic construct
GINAGIHLF

SEQ ID NO: 45173 - protein, 9 aa, synthetic construct
GINAGIRLK

SEQ ID NO: 45174 - protein, 9 aa, synthetic construct
GINAGIRVY

SEQ ID NO: 45175 - protein, 9 aa, synthetic construct
GINAGIRVH

SEQ ID NO: 45176 - protein, 9 aa, synthetic construct
GINAGGRVK

SEQ ID NO: 45177 - protein, 9 aa, synthetic construct
GINAGGKLR

SEQ ID NO: 45178 - protein, 9 aa, synthetic construct
GINAGGKLK

SEQ ID NO: 45179 - protein, 9 aa, synthetic construct
GINAGGKVR

SEQ ID NO: 45180 - protein, 9 aa, synthetic construct
GINAGGKVH

SEQ ID NO: 45181 - protein, 9 aa, synthetic construct
GIQGAVKVR

SEQ ID NO: 45182 - protein, 9 aa, synthetic construct
GIQGALRLF

SEQ ID NO: 45183 - protein, 9 aa, synthetic construct
GIQGALRVY

SEQ ID NO: 45184 - protein, 9 aa, synthetic construct
GIQGALKLY

SEQ ID NO: 45185 - protein, 9 aa, synthetic construct
GIQGALKLK

SEQ ID NO: 45186 - protein, 9 aa, synthetic construct
GIQGALKVK

SEQ ID NO: 45187 - protein, 9 aa, synthetic construct
GIQGAARVR

SEQ ID NO: 45188 - protein, 9 aa, synthetic construct
GIQGAAKLR

SEQ ID NO: 45189 - protein, 9 aa, synthetic construct
GIQGAAKVR

SEQ ID NO: 45190 - protein, 9 aa, synthetic construct
GIQGAIRVK

SEQ ID NO: 45191 - protein, 9 aa, synthetic construct
GIQGAIKLR

SEQ ID NO: 45192 - protein, 9 aa, synthetic construct
GIQGAIKLK

SEQ ID NO: 45193 - protein, 9 aa, synthetic construct
GIQGAGRLK

SEQ ID NO: 45194 - protein, 9 aa, synthetic construct
GIQGAGKLR

SEQ ID NO: 45195 - protein, 9 aa, synthetic construct
GIQGAGKLK

SEQ ID NO: 45196 - protein, 9 aa, synthetic construct
GIQGAGKVR

SEQ ID NO: 45197 - protein, 9 aa, synthetic construct
GIQGAGKVK

SEQ ID NO: 45198 - protein, 9 aa, synthetic construct
GIQGTVKLR

SEQ ID NO: 45199 - protein, 9 aa, synthetic construct
GIQGTVKLK

SEQ ID NO: 45200 - protein, 9 aa, synthetic construct
GIQGTLRVR

SEQ ID NO: 45201 - protein, 9 aa, synthetic construct
GIQGTLKLK

SEQ ID NO: 45202 - protein, 9 aa, synthetic construct
GIQGTLKVK

SEQ ID NO: 45203 - protein, 9 aa, synthetic construct
GIQGTARVR

SEQ ID NO: 45204 - protein, 9 aa, synthetic construct
GIQGTARVK

SEQ ID NO: 45205 - protein, 9 aa, synthetic construct
GIQGTAKVR

SEQ ID NO: 45206 - protein, 9 aa, synthetic construct
GIQGTIRVK

SEQ ID NO: 45207 - protein, 9 aa, synthetic construct
GIQGTGRVR

SEQ ID NO: 45208 - protein, 9 aa, synthetic construct
GIQGTGRVK

SEQ ID NO: 45209 - protein, 9 aa, synthetic construct
GIQGTGKLR

SEQ ID NO: 45210 - protein, 9 aa, synthetic construct
GIQGTGKVR

SEQ ID NO: 45211 - protein, 9 aa, synthetic construct
GIQGSVRVK

SEQ ID NO: 45212 - protein, 9 aa, synthetic construct
GIQGSVKLR

SEQ ID NO: 45213 - protein, 9 aa, synthetic construct
GIQGSVKVR

SEQ ID NO: 45214 - protein, 9 aa, synthetic construct
GIQGSLRLF

SEQ ID NO: 45215 - protein, 9 aa, synthetic construct
GIQGSLRVF

SEQ ID NO: 45216 - protein, 9 aa, synthetic construct
GIQGSLKLF

SEQ ID NO: 45217 - protein, 9 aa, synthetic construct
GIQGSLKVR

SEQ ID NO: 45218 - protein, 9 aa, synthetic construct
GIQGSLKVK

SEQ ID NO: 45219 - protein, 9 aa, synthetic construct
GIQGSARLH

SEQ ID NO: 45220 - protein, 9 aa, synthetic construct
GIQGSARVR

SEQ ID NO: 45221 - protein, 9 aa, synthetic construct
GIQGSIKLR

SEQ ID NO: 45222 - protein, 9 aa, synthetic construct
GIQGSGHLR

SEQ ID NO: 45223 - protein, 9 aa, synthetic construct
GIQGSGHLK

SEQ ID NO: 45224 - protein, 9 aa, synthetic construct
GIQGSGHVR

SEQ ID NO: 45225 - protein, 9 aa, synthetic construct
GIQGSGHVK

SEQ ID NO: 45226 - protein, 9 aa, synthetic construct
GIQGSGRLR

SEQ ID NO: 45227 - protein, 9 aa, synthetic construct
GIQGSGRLH

SEQ ID NO: 45228 - protein, 9 aa, synthetic construct
GIQGSGRLK

SEQ ID NO: 45229 - protein, 9 aa, synthetic construct
GIQGSGKLR

SEQ ID NO: 45230 - protein, 9 aa, synthetic construct
GIQGSGKLH

SEQ ID NO: 45231 - protein, 9 aa, synthetic construct
GIQGSGKVK

SEQ ID NO: 45232 - protein, 9 aa, synthetic construct
GIQGVVRVY

SEQ ID NO: 45233 - protein, 9 aa, synthetic construct
GIQGVVRVR

SEQ ID NO: 45234 - protein, 9 aa, synthetic construct
GIQGVVKLK

SEQ ID NO: 45235 - protein, 9 aa, synthetic construct
GIQGVLRLK

SEQ ID NO: 45236 - protein, 9 aa, synthetic construct
GIQGVLRVK

SEQ ID NO: 45237 - protein, 9 aa, synthetic construct
GIQGVIRVK

SEQ ID NO: 45238 - protein, 9 aa, synthetic construct
GIQGVGRVK

SEQ ID NO: 45239 - protein, 9 aa, synthetic construct
GIQGVGKVR

SEQ ID NO: 45240 - protein, 9 aa, synthetic construct
GIQGGVKLR

SEQ ID NO: 45241 - protein, 9 aa, synthetic construct
GIQGGVKLK

SEQ ID NO: 45242 - protein, 9 aa, synthetic construct
GIQGGVKVR

SEQ ID NO: 45243 - protein, 9 aa, synthetic construct
GIQGGLRVH

SEQ ID NO: 45244 - protein, 9 aa, synthetic construct
GIQGGLKLF

SEQ ID NO: 45245 - protein, 9 aa, synthetic construct
GIQGGLKVR

SEQ ID NO: 45246 - protein, 9 aa, synthetic construct
GIQGGARVR

SEQ ID NO: 45247 - protein, 9 aa, synthetic construct
GIQGGIRVF

SEQ ID NO: 45248 - protein, 9 aa, synthetic construct
GIQGGIKVK

SEQ ID NO: 45249 - protein, 9 aa, synthetic construct
GIQGGGHVR

SEQ ID NO: 45250 - protein, 9 aa, synthetic construct
GIQGGGRLR

SEQ ID NO: 45251 - protein, 9 aa, synthetic construct
GIQGGGRLK

SEQ ID NO: 45252 - protein, 9 aa, synthetic construct
GIQGGGKLK

SEQ ID NO: 45253 - protein, 9 aa, synthetic construct
GIQGGGKVR

SEQ ID NO: 45254 - protein, 9 aa, synthetic construct
GIQGGGKVK

SEQ ID NO: 45255 - protein, 9 aa, synthetic construct
GIQAAVHVY

SEQ ID NO: 45256 - protein, 9 aa, synthetic construct
GIQAAVRVR

SEQ ID NO: 45257 - protein, 9 aa, synthetic construct
GIQAAVRVK

SEQ ID NO: 45258 - protein, 9 aa, synthetic construct
GIQAAVKVR

SEQ ID NO: 45259 - protein, 9 aa, synthetic construct
GIQAALHVF

SEQ ID NO: 45260 - protein, 9 aa, synthetic construct
GIQAALRLY

SEQ ID NO: 45261 - protein, 9 aa, synthetic construct
GIQAALRLF

SEQ ID NO: 45262 - protein, 9 aa, synthetic construct
GIQAALRVY

SEQ ID NO: 45263 - protein, 9 aa, synthetic construct
GIQAALKLF

SEQ ID NO: 45264 - protein, 9 aa, synthetic construct
GIQAAARVY

SEQ ID NO: 45265 - protein, 9 aa, synthetic construct
GIQAAARVK

SEQ ID NO: 45266 - protein, 9 aa, synthetic construct
GIQAAIRLK

SEQ ID NO: 45267 - protein, 9 aa, synthetic construct
GIQAAIKLR

SEQ ID NO: 45268 - protein, 9 aa, synthetic construct
GIQAAIKVK

SEQ ID NO: 45269 - protein, 9 aa, synthetic construct
GIQAAGRLK

SEQ ID NO: 45270 - protein, 9 aa, synthetic construct
GIQAAGKLR

SEQ ID NO: 45271 - protein, 9 aa, synthetic construct
GIQAAGKLK

SEQ ID NO: 45272 - protein, 9 aa, synthetic construct
GIQAAGKVR

SEQ ID NO: 45273 - protein, 9 aa, synthetic construct
GIQAAGKVK

SEQ ID NO: 45274 - protein, 9 aa, synthetic construct
GIQATVRVK

SEQ ID NO: 45275 - protein, 9 aa, synthetic construct
GIQATVKVK

SEQ ID NO: 45276 - protein, 9 aa, synthetic construct
GIQATLHVR

SEQ ID NO: 45277 - protein, 9 aa, synthetic construct
GIQATLRLR

SEQ ID NO: 45278 - protein, 9 aa, synthetic construct
GIQATLRLK

SEQ ID NO: 45279 - protein, 9 aa, synthetic construct
GIQATLKLF

SEQ ID NO: 45280 - protein, 9 aa, synthetic construct
GIQATARLK

SEQ ID NO: 45281 - protein, 9 aa, synthetic construct
GIQATAKLK

SEQ ID NO: 45282 - protein, 9 aa, synthetic construct
GIQATAKVR

SEQ ID NO: 45283 - protein, 9 aa, synthetic construct
GIQATIRLH

SEQ ID NO: 45284 - protein, 9 aa, synthetic construct
GIQATIRLF

SEQ ID NO: 45285 - protein, 9 aa, synthetic construct
GIQATIKLF

SEQ ID NO: 45286 - protein, 9 aa, synthetic construct
GIQATIKVK

SEQ ID NO: 45287 - protein, 9 aa, synthetic construct
GIQATGKLR

SEQ ID NO: 45288 - protein, 9 aa, synthetic construct
GIQASVRVK

SEQ ID NO: 45289 - protein, 9 aa, synthetic construct
GIQASVKLR

SEQ ID NO: 45290 - protein, 9 aa, synthetic construct
GIQASLRLY

SEQ ID NO: 45291 - protein, 9 aa, synthetic construct
GIQASLKLH

SEQ ID NO: 45292 - protein, 9 aa, synthetic construct
GIQASLKVY

SEQ ID NO: 45293 - protein, 9 aa, synthetic construct
GIQASLKVK

SEQ ID NO: 45294 - protein, 9 aa, synthetic construct
GIQASLKVF

SEQ ID NO: 45295 - protein, 9 aa, synthetic construct
PTNGGIKLK

SEQ ID NO: 45296 - protein, 9 aa, synthetic construct
GIQASIRLR

SEQ ID NO: 45297 - protein, 9 aa, synthetic construct
GIQASIKVY

SEQ ID NO: 45298 - protein, 9 aa, synthetic construct
GIQASGKLR

SEQ ID NO: 45299 - protein, 9 aa, synthetic construct
GIQASGKLK

SEQ ID NO: 45300 - protein, 9 aa, synthetic construct
GIQASGKVR

SEQ ID NO: 45301 - protein, 9 aa, synthetic construct
GIQAVVRVH

SEQ ID NO: 45302 - protein, 9 aa, synthetic construct
GIQAVVKVY

SEQ ID NO: 45303 - protein, 9 aa, synthetic construct
GIQAVLKVK

SEQ ID NO: 45304 - protein, 9 aa, synthetic construct
GIQAVARLY

SEQ ID NO: 45305 - protein, 9 aa, synthetic construct
GIQAVARLF

SEQ ID NO: 45306 - protein, 9 aa, synthetic construct
GIQAVAKLH

SEQ ID NO: 45307 - protein, 9 aa, synthetic construct
GIQAVIKLK

SEQ ID NO: 45308 - protein, 9 aa, synthetic construct
GIQAVIKLF

SEQ ID NO: 45309 - protein, 9 aa, synthetic construct
GIQAVIKVK

SEQ ID NO: 45310 - protein, 9 aa, synthetic construct
GIQAVGHVR

SEQ ID NO: 45311 - protein, 9 aa, synthetic construct
GIQAVGRLY

SEQ ID NO: 45312 - protein, 9 aa, synthetic construct
GIQAVGRLR

SEQ ID NO: 45313 - protein, 9 aa, synthetic construct
GIQAVGRLH

SEQ ID NO: 45314 - protein, 9 aa, synthetic construct
GIQAVGRLF

SEQ ID NO: 45315 - protein, 9 aa, synthetic construct
GIQAVGRVR

SEQ ID NO: 45316 - protein, 9 aa, synthetic construct
GIQAVGRVK

SEQ ID NO: 45317 - protein, 9 aa, synthetic construct
GIQAGVRVK

SEQ ID NO: 45318 - protein, 9 aa, synthetic construct
GIQAGVKLK

SEQ ID NO: 45319 - protein, 9 aa, synthetic construct
GIQAGVKVR

SEQ ID NO: 45320 - protein, 9 aa, synthetic construct
GIQAGVKVK

SEQ ID NO: 45321 - protein, 9 aa, synthetic construct
GIQAGLHLH

SEQ ID NO: 45322 - protein, 9 aa, synthetic construct
GIQAGLKVR

SEQ ID NO: 45323 - protein, 9 aa, synthetic construct
GIQAGARLH

SEQ ID NO: 45324 - protein, 9 aa, synthetic construct
GIQAGIRLK

SEQ ID NO: 45325 - protein, 9 aa, synthetic construct
GIQAGGRLR

SEQ ID NO: 45326 - protein, 9 aa, synthetic construct
GIPGAVRVR

SEQ ID NO: 45327 - protein, 9 aa, synthetic construct
GIPGALRVY

SEQ ID NO: 45328 - protein, 9 aa, synthetic construct
GIPGAARVK

SEQ ID NO: 45329 - protein, 9 aa, synthetic construct
GIPGAGKLR

SEQ ID NO: 45330 - protein, 9 aa, synthetic construct
GIPGAGKLK

SEQ ID NO: 45331 - protein, 9 aa, synthetic construct
GIPGAGKVR

SEQ ID NO: 45332 - protein, 9 aa, synthetic construct
GIPGTVRVR

SEQ ID NO: 45333 - protein, 9 aa, synthetic construct
GIPGTVRVK

SEQ ID NO: 45334 - protein, 9 aa, synthetic construct
GIPGTLHLR

SEQ ID NO: 45335 - protein, 9 aa, synthetic construct
GIPGTARVR

SEQ ID NO: 45336 - protein, 9 aa, synthetic construct
PTNAAVKVR

SEQ ID NO: 45337 - protein, 9 aa, synthetic construct
GIPGTIKVR

SEQ ID NO: 45338 - protein, 9 aa, synthetic construct
PTNAALHLY

SEQ ID NO: 45339 - protein, 9 aa, synthetic construct
GIPGSLKVK

SEQ ID NO: 45340 - protein, 9 aa, synthetic construct
GIPGSARLK

SEQ ID NO: 45341 - protein, 9 aa, synthetic construct
GIPGSARVK

SEQ ID NO: 45342 - protein, 9 aa, synthetic construct
GIPGSIRLR

SEQ ID NO: 45343 - protein, 9 aa, synthetic construct
PTNAALRLR

SEQ ID NO: 45344 - protein, 9 aa, synthetic construct
GIPGSIKVK

SEQ ID NO: 45345 - protein, 9 aa, synthetic construct
PTNAALRLK

SEQ ID NO: 45346 - protein, 9 aa, synthetic construct
GIPGSGKLR

SEQ ID NO: 45347 - protein, 9 aa, synthetic construct
GIPGVVRLH

SEQ ID NO: 45348 - protein, 9 aa, synthetic construct
GIPGVVKLR

SEQ ID NO: 45349 - protein, 9 aa, synthetic construct
GIPGVVKLK

SEQ ID NO: 45350 - protein, 9 aa, synthetic construct
GIPGVVKVR

SEQ ID NO: 45351 - protein, 9 aa, synthetic construct
GIPGVLRLY

SEQ ID NO: 45352 - protein, 9 aa, synthetic construct
GIPGVLRLF

SEQ ID NO: 45353 - protein, 9 aa, synthetic construct
GIPGVLRVK

SEQ ID NO: 45354 - protein, 9 aa, synthetic construct
GIPGVLKLK

SEQ ID NO: 45355 - protein, 9 aa, synthetic construct
GIPGVLKVK

SEQ ID NO: 45356 - protein, 9 aa, synthetic construct
GIPGVIHLY

SEQ ID NO: 45357 - protein, 9 aa, synthetic construct
GIPGVIRLK

SEQ ID NO: 45358 - protein, 9 aa, synthetic construct
GIPGVIRVK

SEQ ID NO: 45359 - protein, 9 aa, synthetic construct
GIPGVIKLK

SEQ ID NO: 45360 - protein, 9 aa, synthetic construct
GIPGVGHLF

SEQ ID NO: 45361 - protein, 9 aa, synthetic construct
GIPGVGRVR

SEQ ID NO: 45362 - protein, 9 aa, synthetic construct
GIPGGVKLR

SEQ ID NO: 45363 - protein, 9 aa, synthetic construct
GIPGGVKLK

SEQ ID NO: 45364 - protein, 9 aa, synthetic construct
GIPAAVRVR

SEQ ID NO: 45365 - protein, 9 aa, synthetic construct
GIPAAVKLR

SEQ ID NO: 45366 - protein, 9 aa, synthetic construct
GIPAAVKVR

SEQ ID NO: 45367 - protein, 9 aa, synthetic construct
PTNAAARVK

SEQ ID NO: 45368 - protein, 9 aa, synthetic construct
GIPAALHLR

SEQ ID NO: 45369 - protein, 9 aa, synthetic construct
GIPAALHLF

SEQ ID NO: 45370 - protein, 9 aa, synthetic construct
GIPAALRLK

SEQ ID NO: 45371 - protein, 9 aa, synthetic construct
PTNAAAKLK

SEQ ID NO: 45372 - protein, 9 aa, synthetic construct
GIPAAAKLK

SEQ ID NO: 45373 - protein, 9 aa, synthetic construct
GIPAAIRVR

SEQ ID NO: 45374 - protein, 9 aa, synthetic construct
GIPAAIRVK

SEQ ID NO: 45375 - protein, 9 aa, synthetic construct
GIPAAIRVF

SEQ ID NO: 45376 - protein, 9 aa, synthetic construct
PTNAAAKVR

SEQ ID NO: 45377 - protein, 9 aa, synthetic construct
GIPAAIKVK

SEQ ID NO: 45378 - protein, 9 aa, synthetic construct
GIPAAGRLK

SEQ ID NO: 45379 - protein, 9 aa, synthetic construct
GIPAAGRVK

SEQ ID NO: 45380 - protein, 9 aa, synthetic construct
GIPAAGKLK

SEQ ID NO: 45381 - protein, 9 aa, synthetic construct
GIPAAGKVR

SEQ ID NO: 45382 - protein, 9 aa, synthetic construct
GIPAAGKVK

SEQ ID NO: 45383 - protein, 9 aa, synthetic construct
GIPATVRLR

SEQ ID NO: 45384 - protein, 9 aa, synthetic construct
GIPATVRVK

SEQ ID NO: 45385 - protein, 9 aa, synthetic construct
GIPATVKVR

SEQ ID NO: 45386 - protein, 9 aa, synthetic construct
GIPATLKVK

SEQ ID NO: 45387 - protein, 9 aa, synthetic construct
GIPATARLK

SEQ ID NO: 45388 - protein, 9 aa, synthetic construct
GIPATIRVR

SEQ ID NO: 45389 - protein, 9 aa, synthetic construct
GIPATIRVK

SEQ ID NO: 45390 - protein, 9 aa, synthetic construct
GIPATIKVY

SEQ ID NO: 45391 - protein, 9 aa, synthetic construct
GIPATGRLK

SEQ ID NO: 45392 - protein, 9 aa, synthetic construct
GIPATGRVK

SEQ ID NO: 45393 - protein, 9 aa, synthetic construct
GIPATGKLR

SEQ ID NO: 45394 - protein, 9 aa, synthetic construct
GIPATGKLK

SEQ ID NO: 45395 - protein, 9 aa, synthetic construct
GIPASVRLR

SEQ ID NO: 45396 - protein, 9 aa, synthetic construct
GIPASVRVF

SEQ ID NO: 45397 - protein, 9 aa, synthetic construct
GIPASVKLR

SEQ ID NO: 45398 - protein, 9 aa, synthetic construct
GIPASVKVR

SEQ ID NO: 45399 - protein, 9 aa, synthetic construct
PTNAAIRVK

SEQ ID NO: 45400 - protein, 9 aa, synthetic construct
GIPASLRVH

SEQ ID NO: 45401 - protein, 9 aa, synthetic construct
GIPASLKVH

SEQ ID NO: 45402 - protein, 9 aa, synthetic construct
GIPASARLR

SEQ ID NO: 45403 - protein, 9 aa, synthetic construct
GIPASARVY

SEQ ID NO: 45404 - protein, 9 aa, synthetic construct
GIPASARVK

SEQ ID NO: 45405 - protein, 9 aa, synthetic construct
GIPASIRLY

SEQ ID NO: 45406 - protein, 9 aa, synthetic construct
GIPASIRVR

SEQ ID NO: 45407 - protein, 9 aa, synthetic construct
GIPASIKVR

SEQ ID NO: 45408 - protein, 9 aa, synthetic construct
PTNAAIKVK

SEQ ID NO: 45409 - protein, 9 aa, synthetic construct
GIPAVVHLK

SEQ ID NO: 45410 - protein, 9 aa, synthetic construct
GIPAVLHVR

SEQ ID NO: 45411 - protein, 9 aa, synthetic construct
GIPAVLRVR

SEQ ID NO: 45412 - protein, 9 aa, synthetic construct
GIPAVLRVH

SEQ ID NO: 45413 - protein, 9 aa, synthetic construct
GIPAVLRVK

SEQ ID NO: 45414 - protein, 9 aa, synthetic construct
GIPAVARLY

SEQ ID NO: 45415 - protein, 9 aa, synthetic construct
GIPAVIRLK

SEQ ID NO: 45416 - protein, 9 aa, synthetic construct
GIPAVIRVK

SEQ ID NO: 45417 - protein, 9 aa, synthetic construct
GIPAVIKLK

SEQ ID NO: 45418 - protein, 9 aa, synthetic construct
GIPAVIKVR

SEQ ID NO: 45419 - protein, 9 aa, synthetic construct
GIPAVGKLK

SEQ ID NO: 45420 - protein, 9 aa, synthetic construct
GIPAVGKVK

SEQ ID NO: 45421 - protein, 9 aa, synthetic construct
GIPAGLHVY

SEQ ID NO: 45422 - protein, 9 aa, synthetic construct
GIPAGLRVY

SEQ ID NO: 45423 - protein, 9 aa, synthetic construct
GIPAGLRVH

SEQ ID NO: 45424 - protein, 9 aa, synthetic construct
GIPAGLKVY

SEQ ID NO: 45425 - protein, 9 aa, synthetic construct
PTNAAGKLK

SEQ ID NO: 45426 - protein, 9 aa, synthetic construct
GIPAGIKVK

SEQ ID NO: 45427 - protein, 9 aa, synthetic construct
PLNGALKLF

SEQ ID NO: 45428 - protein, 9 aa, synthetic construct
PLNGASHLH

SEQ ID NO: 45429 - protein, 9 aa, synthetic construct
PLNGASHLK

SEQ ID NO: 45430 - protein, 9 aa, synthetic construct
PLNGASHLF

SEQ ID NO: 45431 - protein, 9 aa, synthetic construct
PLNGASHVY

SEQ ID NO: 45432 - protein, 9 aa, synthetic construct
PLNGASKLK

SEQ ID NO: 45433 - protein, 9 aa, synthetic construct
PLNGASKVR

SEQ ID NO: 45434 - protein, 9 aa, synthetic construct
PLNGATRLR

SEQ ID NO: 45435 - protein, 9 aa, synthetic construct
PLNGATRVR

SEQ ID NO: 45436 - protein, 9 aa, synthetic construct
PLNGATKLR

SEQ ID NO: 45437 - protein, 9 aa, synthetic construct
PLNGATKVR

SEQ ID NO: 45438 - protein, 9 aa, synthetic construct
PLNGTSRLR

SEQ ID NO: 45439 - protein, 9 aa, synthetic construct
PLNGTSRLH

SEQ ID NO: 45440 - protein, 9 aa, synthetic construct
PLNGTSKLR

SEQ ID NO: 45441 - protein, 9 aa, synthetic construct
PLNGTTRLR

SEQ ID NO: 45442 - protein, 9 aa, synthetic construct
PLNGTTRLK

SEQ ID NO: 45443 - protein, 9 aa, synthetic construct
PLNGTTRVY

SEQ ID NO: 45444 - protein, 9 aa, synthetic construct
PLNGTTRVH

SEQ ID NO: 45445 - protein, 9 aa, synthetic construct
PTNATVRLR

SEQ ID NO: 45446 - protein, 9 aa, synthetic construct
PLNGTTKLK

SEQ ID NO: 45447 - protein, 9 aa, synthetic construct
PLNGSSHVR

SEQ ID NO: 45448 - protein, 9 aa, synthetic construct
PLNGSSHVK

SEQ ID NO: 45449 - protein, 9 aa, synthetic construct
PLNGSSHVF

SEQ ID NO: 45450 - protein, 9 aa, synthetic construct
PLNGSSRLF

SEQ ID NO: 45451 - protein, 9 aa, synthetic construct
PLNGSSRVF

SEQ ID NO: 45452 - protein, 9 aa, synthetic construct
PTNATVRLF

SEQ ID NO: 45453 - protein, 9 aa, synthetic construct
PLNGSSKLF

SEQ ID NO: 45454 - protein, 9 aa, synthetic construct
PTNATVRVY

SEQ ID NO: 45455 - protein, 9 aa, synthetic construct
PLNGSTHVH

SEQ ID NO: 45456 - protein, 9 aa, synthetic construct
PLNGSTRLY

SEQ ID NO: 45457 - protein, 9 aa, synthetic construct
PLNGSTRLR

SEQ ID NO: 45458 - protein, 9 aa, synthetic construct
PLNGSTRLF

SEQ ID NO: 45459 - protein, 9 aa, synthetic construct
PLNGSTRVH

SEQ ID NO: 45460 - protein, 9 aa, synthetic construct
PLNGSTRVK

SEQ ID NO: 45461 - protein, 9 aa, synthetic construct
PLNGSTKLR

SEQ ID NO: 45462 - protein, 9 aa, synthetic construct
PTNATVRVK

SEQ ID NO: 45463 - protein, 9 aa, synthetic construct
PLNGVSKVR

SEQ ID NO: 45464 - protein, 9 aa, synthetic construct
PLNGVTRVK

SEQ ID NO: 45465 - protein, 9 aa, synthetic construct
PLNGGSHVY

SEQ ID NO: 45466 - protein, 9 aa, synthetic construct
PLNGGSHVK

SEQ ID NO: 45467 - protein, 9 aa, synthetic construct
PLNGGSRLR

SEQ ID NO: 45468 - protein, 9 aa, synthetic construct
PLNGGSRLK

SEQ ID NO: 45469 - protein, 9 aa, synthetic construct
PLNGGSRVH

SEQ ID NO: 45470 - protein, 9 aa, synthetic construct
PLNGGSKLR

SEQ ID NO: 45471 - protein, 9 aa, synthetic construct
PTNATVKVK

SEQ ID NO: 45472 - protein, 9 aa, synthetic construct
PLNGGTRVH

SEQ ID NO: 45473 - protein, 9 aa, synthetic construct
PLNGGTRVK

SEQ ID NO: 45474 - protein, 9 aa, synthetic construct
PLNGGTKLK

SEQ ID NO: 45475 - protein, 9 aa, synthetic construct
PLNGGTKLF

SEQ ID NO: 45476 - protein, 9 aa, synthetic construct
PLNGGTKVK

SEQ ID NO: 45477 - protein, 9 aa, synthetic construct
PLQGASHVH

SEQ ID NO: 45478 - protein, 9 aa, synthetic construct
PLQGASRLH

SEQ ID NO: 45479 - protein, 9 aa, synthetic construct
PLQGASRVH

SEQ ID NO: 45480 - protein, 9 aa, synthetic construct
PLQGASKLY

SEQ ID NO: 45481 - protein, 9 aa, synthetic construct
PLQGASKLF

SEQ ID NO: 45482 - protein, 9 aa, synthetic construct
PLQGASKVR

SEQ ID NO: 45483 - protein, 9 aa, synthetic construct
PLQGASKVK

SEQ ID NO: 45484 - protein, 9 aa, synthetic construct
PLQGATHVY

SEQ ID NO: 45485 - protein, 9 aa, synthetic construct
PLQGATKLK

SEQ ID NO: 45486 - protein, 9 aa, synthetic construct
PLQGATKVR

SEQ ID NO: 45487 - protein, 9 aa, synthetic construct
PLQGATKVH

SEQ ID NO: 45488 - protein, 9 aa, synthetic construct
PLQGTSHLH

SEQ ID NO: 45489 - protein, 9 aa, synthetic construct
PLQGTSHVY

SEQ ID NO: 45490 - protein, 9 aa, synthetic construct
PLQGTSRVH

SEQ ID NO: 45491 - protein, 9 aa, synthetic construct
PLQGTTRLK

SEQ ID NO: 45492 - protein, 9 aa, synthetic construct
PLQGTTKLR

SEQ ID NO: 45493 - protein, 9 aa, synthetic construct
PLQGSSHLY

SEQ ID NO: 45494 - protein, 9 aa, synthetic construct
PLQGSSHLF

SEQ ID NO: 45495 - protein, 9 aa, synthetic construct
PLQGSSRVH

SEQ ID NO: 45496 - protein, 9 aa, synthetic construct
PLQGSSKLK

SEQ ID NO: 45497 - protein, 9 aa, synthetic construct
PLQGSTHLF

SEQ ID NO: 45498 - protein, 9 aa, synthetic construct
PLQGSTHVH

SEQ ID NO: 45499 - protein, 9 aa, synthetic construct
PLQGSTHVK

SEQ ID NO: 45500 - protein, 9 aa, synthetic construct
PLQGSTRLH

SEQ ID NO: 45501 - protein, 9 aa, synthetic construct
PLQGSTRVY

SEQ ID NO: 45502 - protein, 9 aa, synthetic construct
PLQGSTRVF

SEQ ID NO: 45503 - protein, 9 aa, synthetic construct
PLQGSTKVK

SEQ ID NO: 45504 - protein, 9 aa, synthetic construct
PLQGVSHVF

SEQ ID NO: 45505 - protein, 9 aa, synthetic construct
PLQGVSRLY

SEQ ID NO: 45506 - protein, 9 aa, synthetic construct
PLQGVSRLF

SEQ ID NO: 45507 - protein, 9 aa, synthetic construct
PLQGVSRVR

SEQ ID NO: 45508 - protein, 9 aa, synthetic construct
PLQGVSRVH

SEQ ID NO: 45509 - protein, 9 aa, synthetic construct
PLQGVTHVR

SEQ ID NO: 45510 - protein, 9 aa, synthetic construct
PLQGVTKVK

SEQ ID NO: 45511 - protein, 9 aa, synthetic construct
PLQGGSHLY

SEQ ID NO: 45512 - protein, 9 aa, synthetic construct
PLQGGSHLF

SEQ ID NO: 45513 - protein, 9 aa, synthetic construct
PLQGGSRVH

SEQ ID NO: 45514 - protein, 9 aa, synthetic construct
PLQGGSKVK

SEQ ID NO: 45515 - protein, 9 aa, synthetic construct
PTNATLKVH

SEQ ID NO: 45516 - protein, 9 aa, synthetic construct
PTNATLKVK

SEQ ID NO: 45517 - protein, 9 aa, synthetic construct
PLQGGTRLH

SEQ ID NO: 45518 - protein, 9 aa, synthetic construct
PLQGGTRVY

SEQ ID NO: 45519 - protein, 9 aa, synthetic construct
PLQGGTRVH

SEQ ID NO: 45520 - protein, 9 aa, synthetic construct
PLQGGTRVF

SEQ ID NO: 45521 - protein, 9 aa, synthetic construct
PLQGGTKLR

SEQ ID NO: 45522 - protein, 9 aa, synthetic construct
PLQGGTKVR

SEQ ID NO: 45523 - protein, 9 aa, synthetic construct
PTNGASRLR

SEQ ID NO: 45524 - protein, 9 aa, synthetic construct
PTNGASRVK

SEQ ID NO: 45525 - protein, 9 aa, synthetic construct
PTNGASKVR

SEQ ID NO: 45526 - protein, 9 aa, synthetic construct
PTNGATKLR

SEQ ID NO: 45527 - protein, 9 aa, synthetic construct
PTNGTSHVY

SEQ ID NO: 45528 - protein, 9 aa, synthetic construct
PTNGTSHVR

SEQ ID NO: 45529 - protein, 9 aa, synthetic construct
PTNGTTKLK

SEQ ID NO: 45530 - protein, 9 aa, synthetic construct
PTNGTTKVR

SEQ ID NO: 45531 - protein, 9 aa, synthetic construct
PTNGTTKVK

SEQ ID NO: 45532 - protein, 9 aa, synthetic construct
PTNGSSRLH

SEQ ID NO: 45533 - protein, 9 aa, synthetic construct
PTNGSSRLK

SEQ ID NO: 45534 - protein, 9 aa, synthetic construct
PTNGSSRVR

SEQ ID NO: 45535 - protein, 9 aa, synthetic construct
PTNGSSRVK

SEQ ID NO: 45536 - protein, 9 aa, synthetic construct
PTNGSSKLK

SEQ ID NO: 45537 - protein, 9 aa, synthetic construct
PTNGSSKVK

SEQ ID NO: 45538 - protein, 9 aa, synthetic construct
PTNGSSKVF

SEQ ID NO: 45539 - protein, 9 aa, synthetic construct
PTNATARVR

SEQ ID NO: 45540 - protein, 9 aa, synthetic construct
PTNGSTRLR

SEQ ID NO: 45541 - protein, 9 aa, synthetic construct
PTNGSTRLH

SEQ ID NO: 45542 - protein, 9 aa, synthetic construct
PTNGSTKVK

SEQ ID NO: 45543 - protein, 9 aa, synthetic construct
PTNGVSRLR

SEQ ID NO: 45544 - protein, 9 aa, synthetic construct
PTNGVSRVY

SEQ ID NO: 45545 - protein, 9 aa, synthetic construct
PTNGVSRVR

SEQ ID NO: 45546 - protein, 9 aa, synthetic construct
PTNGVSRVH

SEQ ID NO: 45547 - protein, 9 aa, synthetic construct
PTNGVSKVY

SEQ ID NO: 45548 - protein, 9 aa, synthetic construct
PTNGVSKVK

SEQ ID NO: 45549 - protein, 9 aa, synthetic construct
PTNGVTRLR

SEQ ID NO: 45550 - protein, 9 aa, synthetic construct
PTNGVTRLK

SEQ ID NO: 45551 - protein, 9 aa, synthetic construct
PTNGVTRVK

SEQ ID NO: 45552 - protein, 9 aa, synthetic construct
PTNGGSHLF

SEQ ID NO: 45553 - protein, 9 aa, synthetic construct
PTNGGSHVY

SEQ ID NO: 45554 - protein, 9 aa, synthetic construct
PTNGGSHVR

SEQ ID NO: 45555 - protein, 9 aa, synthetic construct
PTNGGSRVK

SEQ ID NO: 45556 - protein, 9 aa, synthetic construct
PTNATAKVR

SEQ ID NO: 45557 - protein, 9 aa, synthetic construct
PTNGGSKLR

SEQ ID NO: 45558 - protein, 9 aa, synthetic construct
PTNGGSKVR

SEQ ID NO: 45559 - protein, 9 aa, synthetic construct
PTNGGTRLR

SEQ ID NO: 45560 - protein, 9 aa, synthetic construct
PTNGGTRVK

SEQ ID NO: 45561 - protein, 9 aa, synthetic construct
PTNGGTKVR

SEQ ID NO: 45562 - protein, 9 aa, synthetic construct
PTQGASRLY

SEQ ID NO: 45563 - protein, 9 aa, synthetic construct
PTQGASRLF

SEQ ID NO: 45564 - protein, 9 aa, synthetic construct
PTQGASRVY

SEQ ID NO: 45565 - protein, 9 aa, synthetic construct
PTQGASRVK

SEQ ID NO: 45566 - protein, 9 aa, synthetic construct
PTQGASKLR

SEQ ID NO: 45567 - protein, 9 aa, synthetic construct
PTQGASKVY

SEQ ID NO: 45568 - protein, 9 aa, synthetic construct
PTQGATRLH

SEQ ID NO: 45569 - protein, 9 aa, synthetic construct
PTQGATKVK

SEQ ID NO: 45570 - protein, 9 aa, synthetic construct
PTQGTSHVR

SEQ ID NO: 45571 - protein, 9 aa, synthetic construct
PTQGTSKVR

SEQ ID NO: 45572 - protein, 9 aa, synthetic construct
PTQGTSKVK

SEQ ID NO: 45573 - protein, 9 aa, synthetic construct
PTQGSSKLY

SEQ ID NO: 45574 - protein, 9 aa, synthetic construct
PTQGSSKVY

SEQ ID NO: 45575 - protein, 9 aa, synthetic construct
PTQGSSKVH

SEQ ID NO: 45576 - protein, 9 aa, synthetic construct
PTQGSSKVF

SEQ ID NO: 45577 - protein, 9 aa, synthetic construct
PTQGSTRLH

SEQ ID NO: 45578 - protein, 9 aa, synthetic construct
PTQGSTRVY

SEQ ID NO: 45579 - protein, 9 aa, synthetic construct
PTQGSTKLY

SEQ ID NO: 45580 - protein, 9 aa, synthetic construct
PTQGSTKVY

SEQ ID NO: 45581 - protein, 9 aa, synthetic construct
PTQGSTKVH

SEQ ID NO: 45582 - protein, 9 aa, synthetic construct
PTQGVSRLH

SEQ ID NO: 45583 - protein, 9 aa, synthetic construct
PLNGVIRLR

SEQ ID NO: 45584 - protein, 9 aa, synthetic construct
PTQGVSKLH

SEQ ID NO: 45585 - protein, 9 aa, synthetic construct
PTQGVSKLK

SEQ ID NO: 45586 - protein, 9 aa, synthetic construct
PTQGVSKVH

SEQ ID NO: 45587 - protein, 9 aa, synthetic construct
PTQGVTRVF

SEQ ID NO: 45588 - protein, 9 aa, synthetic construct
PTQGVTKLY

SEQ ID NO: 45589 - protein, 9 aa, synthetic construct
PTQGVTKLK

SEQ ID NO: 45590 - protein, 9 aa, synthetic construct
PTQGVTKVR

SEQ ID NO: 45591 - protein, 9 aa, synthetic construct
PTQGVTKVH

SEQ ID NO: 45592 - protein, 9 aa, synthetic construct
PTQGVTKVK

SEQ ID NO: 45593 - protein, 9 aa, synthetic construct
PTQGGSRLY

SEQ ID NO: 45594 - protein, 9 aa, synthetic construct
PTQGGSRLH

SEQ ID NO: 45595 - protein, 9 aa, synthetic construct
PTQGGSRLK

SEQ ID NO: 45596 - protein, 9 aa, synthetic construct
PTQGGSRVH

SEQ ID NO: 45597 - protein, 9 aa, synthetic construct
PTQGGSKLY

SEQ ID NO: 45598 - protein, 9 aa, synthetic construct
PTQGGSKLR

SEQ ID NO: 45599 - protein, 9 aa, synthetic construct
PTQGGSKLH

SEQ ID NO: 45600 - protein, 9 aa, synthetic construct
PTQGGSKVY

SEQ ID NO: 45601 - protein, 9 aa, synthetic construct
PTQGGSKVH

SEQ ID NO: 45602 - protein, 9 aa, synthetic construct
PTQGGSKVK

SEQ ID NO: 45603 - protein, 9 aa, synthetic construct
PTQGGTKVY

SEQ ID NO: 45604 - protein, 9 aa, synthetic construct
PTQGGTKVR

SEQ ID NO: 45605 - protein, 9 aa, synthetic construct
PTQGGTKVK

SEQ ID NO: 45606 - protein, 9 aa, synthetic construct
PTQGGTKVF

SEQ ID NO: 45607 - protein, 9 aa, synthetic construct
PLNGVIRLK

SEQ ID NO: 45608 - protein, 9 aa, synthetic construct
PTNATGRLK

SEQ ID NO: 45609 - protein, 9 aa, synthetic construct
PTNATGKLR

SEQ ID NO: 45610 - protein, 9 aa, synthetic construct
PTNATGKLK

SEQ ID NO: 45611 - protein, 9 aa, synthetic construct
PTNASVRLK

SEQ ID NO: 45612 - protein, 9 aa, synthetic construct
PTNASVKLR

SEQ ID NO: 45613 - protein, 9 aa, synthetic construct
PTNASVKLK

SEQ ID NO: 45614 - protein, 9 aa, synthetic construct
PTNASLHLH

SEQ ID NO: 45615 - protein, 9 aa, synthetic construct
PLNGVIRVF

SEQ ID NO: 45616 - protein, 9 aa, synthetic construct
PTNASLRVR

SEQ ID NO: 45617 - protein, 9 aa, synthetic construct
PTNASLKVK

SEQ ID NO: 45618 - protein, 9 aa, synthetic construct
PLNGVIKLR

SEQ ID NO: 45619 - protein, 9 aa, synthetic construct
PTNASAKVR

SEQ ID NO: 45620 - protein, 9 aa, synthetic construct
PTNASAKVK

SEQ ID NO: 45621 - protein, 9 aa, synthetic construct
PTNASIRVK

SEQ ID NO: 45622 - protein, 9 aa, synthetic construct
PTNASIKVK

SEQ ID NO: 45623 - protein, 9 aa, synthetic construct
PTNASGRLK

SEQ ID NO: 45624 - protein, 9 aa, synthetic construct
PTNASGKLK

SEQ ID NO: 45625 - protein, 9 aa, synthetic construct
PTNASGKVR

SEQ ID NO: 45626 - protein, 9 aa, synthetic construct
PTNAVVHLR

SEQ ID NO: 45627 - protein, 9 aa, synthetic construct
PTNAVVRVY

SEQ ID NO: 45628 - protein, 9 aa, synthetic construct
PTNAVVKLK

SEQ ID NO: 45629 - protein, 9 aa, synthetic construct
PTNAVLRLK

SEQ ID NO: 45630 - protein, 9 aa, synthetic construct
PTNAVLKVK

SEQ ID NO: 45631 - protein, 9 aa, synthetic construct
PTNAVAHLY

SEQ ID NO: 45632 - protein, 9 aa, synthetic construct
PTNAVAHLF

SEQ ID NO: 45633 - protein, 9 aa, synthetic construct
PTNAVAHVF

SEQ ID NO: 45634 - protein, 9 aa, synthetic construct
PTNAVARLY

SEQ ID NO: 45635 - protein, 9 aa, synthetic construct
PTNAVARVY

SEQ ID NO: 45636 - protein, 9 aa, synthetic construct
PTNAVARVH

SEQ ID NO: 45637 - protein, 9 aa, synthetic construct
PTNAVARVK

SEQ ID NO: 45638 - protein, 9 aa, synthetic construct
PTNAVIHLY

SEQ ID NO: 45639 - protein, 9 aa, synthetic construct
PTNAVIHVY

SEQ ID NO: 45640 - protein, 9 aa, synthetic construct
PTNAVIRVY

SEQ ID NO: 45641 - protein, 9 aa, synthetic construct
PTNAVIRVR

SEQ ID NO: 45642 - protein, 9 aa, synthetic construct
PTNAVIRVF

SEQ ID NO: 45643 - protein, 9 aa, synthetic construct
PTNAVGRLR

SEQ ID NO: 45644 - protein, 9 aa, synthetic construct
PTNAVGRLK

SEQ ID NO: 45645 - protein, 9 aa, synthetic construct
PTNAVGRVK

SEQ ID NO: 45646 - protein, 9 aa, synthetic construct
PLNGVGRVR

SEQ ID NO: 45647 - protein, 9 aa, synthetic construct
PTNAGVRLK

SEQ ID NO: 45648 - protein, 9 aa, synthetic construct
PTNAGVRVK

SEQ ID NO: 45649 - protein, 9 aa, synthetic construct
PTNAGVKLR

SEQ ID NO: 45650 - protein, 9 aa, synthetic construct
PTNAGLKVK

SEQ ID NO: 45651 - protein, 9 aa, synthetic construct
PTNAGIRLR

SEQ ID NO: 45652 - protein, 9 aa, synthetic construct
PTNAGIKVK

SEQ ID NO: 45653 - protein, 9 aa, synthetic construct
PTNAGGRVK

SEQ ID NO: 45654 - protein, 9 aa, synthetic construct
PTNAGGKLR

SEQ ID NO: 45655 - protein, 9 aa, synthetic construct
PTNAGGKLK

SEQ ID NO: 45656 - protein, 9 aa, synthetic construct
PTNAGGKVR

SEQ ID NO: 45657 - protein, 9 aa, synthetic construct
PTQGAVKVR

SEQ ID NO: 45658 - protein, 9 aa, synthetic construct
PTQGALRVY

SEQ ID NO: 45659 - protein, 9 aa, synthetic construct
PTQGALKLK

SEQ ID NO: 45660 - protein, 9 aa, synthetic construct
PTQGAARLR

SEQ ID NO: 45661 - protein, 9 aa, synthetic construct
PLNGGVRLR

SEQ ID NO: 45662 - protein, 9 aa, synthetic construct
PTQGAGRLR

SEQ ID NO: 45663 - protein, 9 aa, synthetic construct
PTQGAGKLR

SEQ ID NO: 45664 - protein, 9 aa, synthetic construct
PTQGAGKLK

SEQ ID NO: 45665 - protein, 9 aa, synthetic construct
PTQGAGKVR

SEQ ID NO: 45666 - protein, 9 aa, synthetic construct
PTQGAGKVK

SEQ ID NO: 45667 - protein, 9 aa, synthetic construct
PTQGTVKVK

SEQ ID NO: 45668 - protein, 9 aa, synthetic construct
PTQGTLRLR

SEQ ID NO: 45669 - protein, 9 aa, synthetic construct
PTQGTARVR

SEQ ID NO: 45670 - protein, 9 aa, synthetic construct
PLNGGVKLK

SEQ ID NO: 45671 - protein, 9 aa, synthetic construct
PTQGTIRLR

SEQ ID NO: 45672 - protein, 9 aa, synthetic construct
PTQGTIRLK

SEQ ID NO: 45673 - protein, 9 aa, synthetic construct
PTQGTIRVK

SEQ ID NO: 45674 - protein, 9 aa, synthetic construct
PLNGGVKVR

SEQ ID NO: 45675 - protein, 9 aa, synthetic construct
PTQGTIKLK

SEQ ID NO: 45676 - protein, 9 aa, synthetic construct
PTQGTGRLR

SEQ ID NO: 45677 - protein, 9 aa, synthetic construct
PTQGTGKLK

SEQ ID NO: 45678 - protein, 9 aa, synthetic construct
PTQGTGKVK

SEQ ID NO: 45679 - protein, 9 aa, synthetic construct
PTQGSVRVK

SEQ ID NO: 45680 - protein, 9 aa, synthetic construct
PLNGGLHLH

SEQ ID NO: 45681 - protein, 9 aa, synthetic construct
PTQGSLRLH

SEQ ID NO: 45682 - protein, 9 aa, synthetic construct
PTQGSARLR

SEQ ID NO: 45683 - protein, 9 aa, synthetic construct
PTQGSARVH

SEQ ID NO: 45684 - protein, 9 aa, synthetic construct
PLNGGLRLH

SEQ ID NO: 45685 - protein, 9 aa, synthetic construct
PTQGSGHVR

SEQ ID NO: 45686 - protein, 9 aa, synthetic construct
PTQGSGRVR

SEQ ID NO: 45687 - protein, 9 aa, synthetic construct
PTQGVLKVK

SEQ ID NO: 45688 - protein, 9 aa, synthetic construct
PTQGVAKVK

SEQ ID NO: 45689 - protein, 9 aa, synthetic construct
PTQGVIRLK

SEQ ID NO: 45690 - protein, 9 aa, synthetic construct
PTQGVIKLR

SEQ ID NO: 45691 - protein, 9 aa, synthetic construct
PTQGVGRVR

SEQ ID NO: 45692 - protein, 9 aa, synthetic construct
PTQGVGRVK

SEQ ID NO: 45693 - protein, 9 aa, synthetic construct
PTQGGVRLR

SEQ ID NO: 45694 - protein, 9 aa, synthetic construct
PTQGGVRVK

SEQ ID NO: 45695 - protein, 9 aa, synthetic construct
PTQGGVKLK

SEQ ID NO: 45696 - protein, 9 aa, synthetic construct
PTQGGLRVR

SEQ ID NO: 45697 - protein, 9 aa, synthetic construct
PTQGGIKVK

SEQ ID NO: 45698 - protein, 9 aa, synthetic construct
PTQGGGRLK

SEQ ID NO: 45699 - protein, 9 aa, synthetic construct
PTQAALRVK

SEQ ID NO: 45700 - protein, 9 aa, synthetic construct
PTQAALKLK

SEQ ID NO: 45701 - protein, 9 aa, synthetic construct
PTQAALKVR

SEQ ID NO: 45702 - protein, 9 aa, synthetic construct
PTQAAARVK

SEQ ID NO: 45703 - protein, 9 aa, synthetic construct
PTQAAAKLK

SEQ ID NO: 45704 - protein, 9 aa, synthetic construct
PTQAAAKVR

SEQ ID NO: 45705 - protein, 9 aa, synthetic construct
PTQAAGKVR

SEQ ID NO: 45706 - protein, 9 aa, synthetic construct
PTQAAGKVK

SEQ ID NO: 45707 - protein, 9 aa, synthetic construct
PTQATLRVR

SEQ ID NO: 45708 - protein, 9 aa, synthetic construct
PTQATLRVK

SEQ ID NO: 45709 - protein, 9 aa, synthetic construct
PTQATLKLK

SEQ ID NO: 45710 - protein, 9 aa, synthetic construct
PTQATLKVR

SEQ ID NO: 45711 - protein, 9 aa, synthetic construct
PTQATLKVK

SEQ ID NO: 45712 - protein, 9 aa, synthetic construct
PTQATAKVR

SEQ ID NO: 45713 - protein, 9 aa, synthetic construct
PTQATIRVK

SEQ ID NO: 45714 - protein, 9 aa, synthetic construct
PLNGGIRLR

SEQ ID NO: 45715 - protein, 9 aa, synthetic construct
PTQATIKLR

SEQ ID NO: 45716 - protein, 9 aa, synthetic construct
PTQATIKVR

SEQ ID NO: 45717 - protein, 9 aa, synthetic construct
PLNGGIRLK

SEQ ID NO: 45718 - protein, 9 aa, synthetic construct
PTQATGRLR

SEQ ID NO: 45719 - protein, 9 aa, synthetic construct
PTQATGKVK

SEQ ID NO: 45720 - protein, 9 aa, synthetic construct
PLNGGIRVR

SEQ ID NO: 45721 - protein, 9 aa, synthetic construct
PTQASVRVK

SEQ ID NO: 45722 - protein, 9 aa, synthetic construct
PTQASVKLK

SEQ ID NO: 45723 - protein, 9 aa, synthetic construct
PLNGGIRVK

SEQ ID NO: 45724 - protein, 9 aa, synthetic construct
PTQASLKLK

SEQ ID NO: 45725 - protein, 9 aa, synthetic construct
PTQASLKVR

SEQ ID NO: 45726 - protein, 9 aa, synthetic construct
PTQASAKVK

SEQ ID NO: 45727 - protein, 9 aa, synthetic construct
PTQASIRVK

SEQ ID NO: 45728 - protein, 9 aa, synthetic construct
PLNGGIKVR

SEQ ID NO: 45729 - protein, 9 aa, synthetic construct
PTQASIKLK

SEQ ID NO: 45730 - protein, 9 aa, synthetic construct
PTQASIKVY

SEQ ID NO: 45731 - protein, 9 aa, synthetic construct
PTQASGKLR

SEQ ID NO: 45732 - protein, 9 aa, synthetic construct
PTQAVLRVK

SEQ ID NO: 45733 - protein, 9 aa, synthetic construct
PTQAVLKVR

SEQ ID NO: 45734 - protein, 9 aa, synthetic construct
PTQAVIKLK

SEQ ID NO: 45735 - protein, 9 aa, synthetic construct
PTQAVIKVR

SEQ ID NO: 45736 - protein, 9 aa, synthetic construct
PTQAVIKVK

SEQ ID NO: 45737 - protein, 9 aa, synthetic construct
PTQAVGRLR

SEQ ID NO: 45738 - protein, 9 aa, synthetic construct
PTQAVGRVR

SEQ ID NO: 45739 - protein, 9 aa, synthetic construct
PTQAGARVK

SEQ ID NO: 45740 - protein, 9 aa, synthetic construct
PTQAGIRVH

SEQ ID NO: 45741 - protein, 9 aa, synthetic construct
PTQAGGKVR

SEQ ID NO: 45742 - protein, 9 aa, synthetic construct
PTPGAVRVR

SEQ ID NO: 45743 - protein, 9 aa, synthetic construct
PTPGALRLK

SEQ ID NO: 45744 - protein, 9 aa, synthetic construct
PTPGALRVY

SEQ ID NO: 45745 - protein, 9 aa, synthetic construct
PTPGALKLK

SEQ ID NO: 45746 - protein, 9 aa, synthetic construct
PTPGALKVK

SEQ ID NO: 45747 - protein, 9 aa, synthetic construct
PTPGAARVK

SEQ ID NO: 45748 - protein, 9 aa, synthetic construct
PTPGAIRVK

SEQ ID NO: 45749 - protein, 9 aa, synthetic construct
PTPGAGKLR

SEQ ID NO: 45750 - protein, 9 aa, synthetic construct
PTPGAGKLK

SEQ ID NO: 45751 - protein, 9 aa, synthetic construct
PTPGAGKVR

SEQ ID NO: 45752 - protein, 9 aa, synthetic construct
PTPGTAKVR

SEQ ID NO: 45753 - protein, 9 aa, synthetic construct
PTPGTIRLK

SEQ ID NO: 45754 - protein, 9 aa, synthetic construct
PTPGTIRVR

SEQ ID NO: 45755 - protein, 9 aa, synthetic construct
PTPGTIRVK

SEQ ID NO: 45756 - protein, 9 aa, synthetic construct
PTPGTIKVK

SEQ ID NO: 45757 - protein, 9 aa, synthetic construct
PTPGTGRVK

SEQ ID NO: 45758 - protein, 9 aa, synthetic construct
PTPGTGKLR

SEQ ID NO: 45759 - protein, 9 aa, synthetic construct
PTPGTGKLK

SEQ ID NO: 45760 - protein, 9 aa, synthetic construct
PTPGTGKVK

SEQ ID NO: 45761 - protein, 9 aa, synthetic construct
PTPGSVRLR

SEQ ID NO: 45762 - protein, 9 aa, synthetic construct
PTPGSVRVK

SEQ ID NO: 45763 - protein, 9 aa, synthetic construct
PTPGSVKLR

SEQ ID NO: 45764 - protein, 9 aa, synthetic construct
PTPGSVKLK

SEQ ID NO: 45765 - protein, 9 aa, synthetic construct
PTPGSLRLY

SEQ ID NO: 45766 - protein, 9 aa, synthetic construct
PTPGSLRLR

SEQ ID NO: 45767 - protein, 9 aa, synthetic construct
PTPGSAKLK

SEQ ID NO: 45768 - protein, 9 aa, synthetic construct
PLNAALRLR

SEQ ID NO: 45769 - protein, 9 aa, synthetic construct
PTPGSIKVK

SEQ ID NO: 45770 - protein, 9 aa, synthetic construct
PTPGSGRVR

SEQ ID NO: 45771 - protein, 9 aa, synthetic construct
PTPGVVRLR

SEQ ID NO: 45772 - protein, 9 aa, synthetic construct
PLNAALRVK

SEQ ID NO: 45773 - protein, 9 aa, synthetic construct
PTPGVLRLR

SEQ ID NO: 45774 - protein, 9 aa, synthetic construct
PTPGVLKLK

SEQ ID NO: 45775 - protein, 9 aa, synthetic construct
PTPGVLKVR

SEQ ID NO: 45776 - protein, 9 aa, synthetic construct
PTPGVLKVK

SEQ ID NO: 45777 - protein, 9 aa, synthetic construct
PTPGVIHLY

SEQ ID NO: 45778 - protein, 9 aa, synthetic construct
PTPGVIRLH

SEQ ID NO: 45779 - protein, 9 aa, synthetic construct
PTPGVIRVR

SEQ ID NO: 45780 - protein, 9 aa, synthetic construct
PTPGVIKVR

SEQ ID NO: 45781 - protein, 9 aa, synthetic construct
PTPGGIRVK

SEQ ID NO: 45782 - protein, 9 aa, synthetic construct
PTPGGIKVK

SEQ ID NO: 45783 - protein, 9 aa, synthetic construct
PTPGGGKVR

SEQ ID NO: 45784 - protein, 9 aa, synthetic construct
PTPAAVRVR

SEQ ID NO: 45785 - protein, 9 aa, synthetic construct
PTPAALHLR

SEQ ID NO: 45786 - protein, 9 aa, synthetic construct
PTPAALHLF

SEQ ID NO: 45787 - protein, 9 aa, synthetic construct
PTPAALRVK

SEQ ID NO: 45788 - protein, 9 aa, synthetic construct
PTPAAIRVR

SEQ ID NO: 45789 - protein, 9 aa, synthetic construct
PTPAAIKLR

SEQ ID NO: 45790 - protein, 9 aa, synthetic construct
PTPAAGKLK

SEQ ID NO: 45791 - protein, 9 aa, synthetic construct
PTPATVRVR

SEQ ID NO: 45792 - protein, 9 aa, synthetic construct
PTPATLRVK

SEQ ID NO: 45793 - protein, 9 aa, synthetic construct
PTPATARLR

SEQ ID NO: 45794 - protein, 9 aa, synthetic construct
PTPATAKLK

SEQ ID NO: 45795 - protein, 9 aa, synthetic construct
PTPATAKVR

SEQ ID NO: 45796 - protein, 9 aa, synthetic construct
PTPATGKVR

SEQ ID NO: 45797 - protein, 9 aa, synthetic construct
PTPASVRVR

SEQ ID NO: 45798 - protein, 9 aa, synthetic construct
PTPASVKLR

SEQ ID NO: 45799 - protein, 9 aa, synthetic construct
PTPASLRVH

SEQ ID NO: 45800 - protein, 9 aa, synthetic construct
PLNGAAKVR

SEQ ID NO: 45801 - protein, 9 aa, synthetic construct
PTPASLKLR

SEQ ID NO: 45802 - protein, 9 aa, synthetic construct
PTPASLKVR

SEQ ID NO: 45803 - protein, 9 aa, synthetic construct
PTPASLKVK

SEQ ID NO: 45804 - protein, 9 aa, synthetic construct
PTPASARVK

SEQ ID NO: 45805 - protein, 9 aa, synthetic construct
PTPASAKVK

SEQ ID NO: 45806 - protein, 9 aa, synthetic construct
PTPASGKLR

SEQ ID NO: 45807 - protein, 9 aa, synthetic construct
PTPAVLHLR

SEQ ID NO: 45808 - protein, 9 aa, synthetic construct
PTPAVLRVH

SEQ ID NO: 45809 - protein, 9 aa, synthetic construct
PTPAVARLY

SEQ ID NO: 45810 - protein, 9 aa, synthetic construct
PTPAVIHLY

SEQ ID NO: 45811 - protein, 9 aa, synthetic construct
PTPAVGRVR

SEQ ID NO: 45812 - protein, 9 aa, synthetic construct
PTPAVGKLK

SEQ ID NO: 45813 - protein, 9 aa, synthetic construct
PTPAGLKVK

SEQ ID NO: 45814 - protein, 9 aa, synthetic construct
PTPAGGRLR

SEQ ID NO: 45815 - protein, 9 aa, synthetic construct
PTPAGGRVK

SEQ ID NO: 45816 - protein, 9 aa, synthetic construct
PSNGAVRLR

SEQ ID NO: 45817 - protein, 9 aa, synthetic construct
PSNGAVRLK

SEQ ID NO: 45818 - protein, 9 aa, synthetic construct
PSNGAVKVR

SEQ ID NO: 45819 - protein, 9 aa, synthetic construct
PSNGAARLK

SEQ ID NO: 45820 - protein, 9 aa, synthetic construct
PSNGAIRVR

SEQ ID NO: 45821 - protein, 9 aa, synthetic construct
PSNGAIKLK

SEQ ID NO: 45822 - protein, 9 aa, synthetic construct
PSNGAGRLR

SEQ ID NO: 45823 - protein, 9 aa, synthetic construct
PSNGAGKVR

SEQ ID NO: 45824 - protein, 9 aa, synthetic construct
PLNATVRVR

SEQ ID NO: 45825 - protein, 9 aa, synthetic construct
PSNGTVRVR

SEQ ID NO: 45826 - protein, 9 aa, synthetic construct
PLNATVRVK

SEQ ID NO: 45827 - protein, 9 aa, synthetic construct
PSNGTLKVK

SEQ ID NO: 45828 - protein, 9 aa, synthetic construct
PSNGTAKVR

SEQ ID NO: 45829 - protein, 9 aa, synthetic construct
PSNGTGRVK

SEQ ID NO: 45830 - protein, 9 aa, synthetic construct
PSNGTGKLR

SEQ ID NO: 45831 - protein, 9 aa, synthetic construct
PSNGTGKVK

SEQ ID NO: 45832 - protein, 9 aa, synthetic construct
PSNGSVRVK

SEQ ID NO: 45833 - protein, 9 aa, synthetic construct
PSNGSVKVR

SEQ ID NO: 45834 - protein, 9 aa, synthetic construct
PSNGSARVK

SEQ ID NO: 45835 - protein, 9 aa, synthetic construct
PSNGSIRVK

SEQ ID NO: 45836 - protein, 9 aa, synthetic construct
PLNATLRLR

SEQ ID NO: 45837 - protein, 9 aa, synthetic construct
PSNGSGRVR

SEQ ID NO: 45838 - protein, 9 aa, synthetic construct
PSNGVAKLR

SEQ ID NO: 45839 - protein, 9 aa, synthetic construct
PSNGVIRLK

SEQ ID NO: 45840 - protein, 9 aa, synthetic construct
PSNGVIRVK

SEQ ID NO: 45841 - protein, 9 aa, synthetic construct
PSNGVIKLR

SEQ ID NO: 45842 - protein, 9 aa, synthetic construct
PSNGVIKVR

SEQ ID NO: 45843 - protein, 9 aa, synthetic construct
PSNGVGRVR

SEQ ID NO: 45844 - protein, 9 aa, synthetic construct
PSNGVGKLK

SEQ ID NO: 45845 - protein, 9 aa, synthetic construct
PSNGGVRLK

SEQ ID NO: 45846 - protein, 9 aa, synthetic construct
PSNGGLRVH

SEQ ID NO: 45847 - protein, 9 aa, synthetic construct
PSNGGARVR

SEQ ID NO: 45848 - protein, 9 aa, synthetic construct
PSNGGAKLK

SEQ ID NO: 45849 - protein, 9 aa, synthetic construct
PSNGGIRLR

SEQ ID NO: 45850 - protein, 9 aa, synthetic construct
PSNGGIRVK

SEQ ID NO: 45851 - protein, 9 aa, synthetic construct
PLNATARLK

SEQ ID NO: 45852 - protein, 9 aa, synthetic construct
PSNGGGRVK

SEQ ID NO: 45853 - protein, 9 aa, synthetic construct
PSNGGGKVR

SEQ ID NO: 45854 - protein, 9 aa, synthetic construct
PSNAAVKVR

SEQ ID NO: 45855 - protein, 9 aa, synthetic construct
PSNAALRVY

SEQ ID NO: 45856 - protein, 9 aa, synthetic construct
PSNAALKVR

SEQ ID NO: 45857 - protein, 9 aa, synthetic construct
PSNAALKVK

SEQ ID NO: 45858 - protein, 9 aa, synthetic construct
PSNAAARVK

SEQ ID NO: 45859 - protein, 9 aa, synthetic construct
PSNAAGRLK

SEQ ID NO: 45860 - protein, 9 aa, synthetic construct
PSNAAGKLR

SEQ ID NO: 45861 - protein, 9 aa, synthetic construct
PSNATVRLF

SEQ ID NO: 45862 - protein, 9 aa, synthetic construct
PSNATVRVR

SEQ ID NO: 45863 - protein, 9 aa, synthetic construct
PSNATVRVK

SEQ ID NO: 45864 - protein, 9 aa, synthetic construct
PSNATVKVK

SEQ ID NO: 45865 - protein, 9 aa, synthetic construct
PSNATLRVH

SEQ ID NO: 45866 - protein, 9 aa, synthetic construct
PSNATLKLR

SEQ ID NO: 45867 - protein, 9 aa, synthetic construct
PSNATLKLK

SEQ ID NO: 45868 - protein, 9 aa, synthetic construct
PSNATAKVR

SEQ ID NO: 45869 - protein, 9 aa, synthetic construct
PSQAVVHLH

SEQ ID NO: 45870 - protein, 9 aa, synthetic construct
PSQAVARLY

SEQ ID NO: 45871 - protein, 9 aa, synthetic construct
PSQAGIHVY

SEQ ID NO: 45872 - protein, 9 aa, synthetic construct
PANASIRLR

SEQ ID NO: 45873 - protein, 9 aa, synthetic construct
PANAGLRVY

SEQ ID NO: 45874 - protein, 9 aa, synthetic construct
PLQGALKLY

SEQ ID NO: 45875 - protein, 9 aa, synthetic construct
PAQGVARLY

SEQ ID NO: 45876 - protein, 9 aa, synthetic construct
PAQASIRLR

SEQ ID NO: 45877 - protein, 9 aa, synthetic construct
PVNATLHLY

SEQ ID NO: 45878 - protein, 9 aa, synthetic construct
PVQGGIRLR

SEQ ID NO: 45879 - protein, 9 aa, synthetic construct
PVQAGIRLK

SEQ ID NO: 45880 - protein, 9 aa, synthetic construct
PLQGGIRLK

SEQ ID NO: 45881 - protein, 9 aa, synthetic construct
PVPAVLHLH

SEQ ID NO: 45882 - protein, 9 aa, synthetic construct
PINGSARVR

SEQ ID NO: 45883 - protein, 9 aa, synthetic construct
PINGVLHVF

SEQ ID NO: 45884 - protein, 9 aa, synthetic construct
PINASIRLR

SEQ ID NO: 45885 - protein, 9 aa, synthetic construct
PINAVARLF

SEQ ID NO: 45886 - protein, 9 aa, synthetic construct
PIQGVVRLY

SEQ ID NO: 45887 - protein, 9 aa, synthetic construct
PIQAAIRLR

SEQ ID NO: 45888 - protein, 9 aa, synthetic construct
PLNGAVKVR

SEQ ID NO: 45889 - protein, 9 aa, synthetic construct
GLNGTIHLY

SEQ ID NO: 45890 - protein, 9 aa, synthetic construct
GLNGVARLY

SEQ ID NO: 45891 - protein, 9 aa, synthetic construct
GLNGVAKLH

SEQ ID NO: 45892 - protein, 9 aa, synthetic construct
PLQAVAHVH

SEQ ID NO: 45893 - protein, 9 aa, synthetic construct
GLNAAVHLY

SEQ ID NO: 45894 - protein, 9 aa, synthetic construct
GLNAALKLK

SEQ ID NO: 45895 - protein, 9 aa, synthetic construct
PLQAVIKLK

SEQ ID NO: 45896 - protein, 9 aa, synthetic construct
GLNAGVHLY

SEQ ID NO: 45897 - protein, 9 aa, synthetic construct
GLQASIKVH

SEQ ID NO: 45898 - protein, 9 aa, synthetic construct
GTNATLHLY

SEQ ID NO: 45899 - protein, 9 aa, synthetic construct
GTNATLKLK

SEQ ID NO: 45900 - protein, 9 aa, synthetic construct
GTQGGIRLK

SEQ ID NO: 45901 - protein, 9 aa, synthetic construct
GTQAAVHLF

SEQ ID NO: 45902 - protein, 9 aa, synthetic construct
GTQAGIRVY

SEQ ID NO: 45903 - protein, 9 aa, synthetic construct
GTPGAGKVR

SEQ ID NO: 45904 - protein, 9 aa, synthetic construct
GTPGTLHLH

SEQ ID NO: 45905 - protein, 9 aa, synthetic construct
GTPGTGKVK

SEQ ID NO: 45906 - protein, 9 aa, synthetic construct
PLPGVARVK

SEQ ID NO: 45907 - protein, 9 aa, synthetic construct
GSQGAVHLF

SEQ ID NO: 45908 - protein, 9 aa, synthetic construct
GSQAAVHLY

SEQ ID NO: 45909 - protein, 9 aa, synthetic construct
GANGVLKLH

SEQ ID NO: 45910 - protein, 9 aa, synthetic construct
GANATGHVY

SEQ ID NO: 45911 - protein, 9 aa, synthetic construct
GANAVLHVY

SEQ ID NO: 45912 - protein, 9 aa, synthetic construct
GANAVLKLK

SEQ ID NO: 45913 - protein, 9 aa, synthetic construct
GAPGAVKVR

SEQ ID NO: 45914 - protein, 9 aa, synthetic construct
GVNGTAKVH

SEQ ID NO: 45915 - protein, 9 aa, synthetic construct
GVNGVLHVF

SEQ ID NO: 45916 - protein, 9 aa, synthetic construct
GVPGAGKVR

SEQ ID NO: 45917 - protein, 9 aa, synthetic construct
GINGALHLY

SEQ ID NO: 45918 - protein, 9 aa, synthetic construct
GINATLHVY

SEQ ID NO: 45919 - protein, 9 aa, synthetic construct
GIQAAVHLF

SEQ ID NO: 45920 - protein, 9 aa, synthetic construct
PTNGGIRLK

SEQ ID NO: 45921 - protein, 9 aa, synthetic construct
PLNGVARLF

SEQ ID NO: 45922 - protein, 9 aa, synthetic construct
PLQGGSKLR

SEQ ID NO: 45923 - protein, 9 aa, synthetic construct
PTNGTSHVH

SEQ ID NO: 45924 - protein, 9 aa, synthetic construct
PTNGGSHVH

SEQ ID NO: 45925 - protein, 9 aa, synthetic construct
PTNAVLHLH

SEQ ID NO: 45926 - protein, 9 aa, synthetic construct
PTQGAIRLR

SEQ ID NO: 45927 - protein, 9 aa, synthetic construct
PTQGTIKLR

SEQ ID NO: 45928 - protein, 9 aa, synthetic construct
PTQAVARLY

SEQ ID NO: 45929 - protein, 9 aa, synthetic construct
PTPGAVKVR

SEQ ID NO: 45930 - protein, 9 aa, synthetic construct
PLNAALHVF

SEQ ID NO: 45931 - protein, 9 aa, synthetic construct
PTPGGLRLH

SEQ ID NO: 45932 - protein, 9 aa, synthetic construct
PSNGSLRVR

SEQ ID NO: 45933 - protein, 9 aa, synthetic construct
PSNGVLHLY

SEQ ID NO: 45934 - protein, 9 aa, synthetic construct
PSNGGLRVK

SEQ ID NO: 45935 - protein, 9 aa, synthetic construct
PLNAVIRLY

SEQ ID NO: 45936 - protein, 9 aa, synthetic construct
PSPAVAHLY

SEQ ID NO: 45937 - protein, 9 aa, synthetic construct
PANGAVRVK

SEQ ID NO: 45938 - protein, 9 aa, synthetic construct
PANGGIKLK

SEQ ID NO: 45939 - protein, 9 aa, synthetic construct
PAQGSLRLF

SEQ ID NO: 45940 - protein, 9 aa, synthetic construct
PAQAGIRVK

SEQ ID NO: 45941 - protein, 9 aa, synthetic construct
PAPATLRVH

SEQ ID NO: 45942 - protein, 9 aa, synthetic construct
PVNGVLHLR

SEQ ID NO: 45943 - protein, 9 aa, synthetic construct
PVNAVLHVR

SEQ ID NO: 45944 - protein, 9 aa, synthetic construct
PVQATIRLR

SEQ ID NO: 45945 - protein, 9 aa, synthetic construct
PLQGGLKLY

SEQ ID NO: 45946 - protein, 9 aa, synthetic construct
PLNGTAKLK

SEQ ID NO: 45947 - protein, 9 aa, synthetic construct
PINAVIRLY

SEQ ID NO: 45948 - protein, 9 aa, synthetic construct
PIQATGKVR

SEQ ID NO: 45949 - protein, 9 aa, synthetic construct
PIQASIHLR

SEQ ID NO: 45950 - protein, 9 aa, synthetic construct
PIQAVARVH

SEQ ID NO: 45951 - protein, 9 aa, synthetic construct
GLNGAVHLF

SEQ ID NO: 45952 - protein, 9 aa, synthetic construct
GLNGSIRLY

SEQ ID NO: 45953 - protein, 9 aa, synthetic construct
GLNGVLHVR

SEQ ID NO: 45954 - protein, 9 aa, synthetic construct
GLNAVVKLF

SEQ ID NO: 45955 - protein, 9 aa, synthetic construct
GLQAGARVY

SEQ ID NO: 45956 - protein, 9 aa, synthetic construct
GTNASIHVH

SEQ ID NO: 45957 - protein, 9 aa, synthetic construct
GTQGSGKVR

SEQ ID NO: 45958 - protein, 9 aa, synthetic construct
GTQASIHLF

SEQ ID NO: 45959 - protein, 9 aa, synthetic construct
GTQASIRLK

SEQ ID NO: 45960 - protein, 9 aa, synthetic construct
GTPGTGKLR

SEQ ID NO: 45961 - protein, 9 aa, synthetic construct
GTPGSVKVR

SEQ ID NO: 45962 - protein, 9 aa, synthetic construct
GTPGSGRVR

SEQ ID NO: 45963 - protein, 9 aa, synthetic construct
GTPGVGHLY

SEQ ID NO: 45964 - protein, 9 aa, synthetic construct
GANATVKVK

SEQ ID NO: 45965 - protein, 9 aa, synthetic construct
GAQGVIHLF

SEQ ID NO: 45966 - protein, 9 aa, synthetic construct
GAPGAIKLK

SEQ ID NO: 45967 - protein, 9 aa, synthetic construct
GAPGGLKLF

SEQ ID NO: 45968 - protein, 9 aa, synthetic construct
GAPATVKVK

SEQ ID NO: 45969 - protein, 9 aa, synthetic construct
GVNAVVRLF

SEQ ID NO: 45970 - protein, 9 aa, synthetic construct
GVNAVIHLF

SEQ ID NO: 45971 - protein, 9 aa, synthetic construct
GIPGVVRLY

SEQ ID NO: 45972 - protein, 9 aa, synthetic construct
PTNGGTKLK

SEQ ID NO: 45973 - protein, 9 aa, synthetic construct
PTNASLHVF

SEQ ID NO: 45974 - protein, 9 aa, synthetic construct
PTQGSGKVR

SEQ ID NO: 45975 - protein, 9 aa, synthetic construct
PTQGGIRLK

SEQ ID NO: 45976 - protein, 9 aa, synthetic construct
PTQASIRLK

SEQ ID NO: 45977 - protein, 9 aa, synthetic construct
PLNATIKVR

SEQ ID NO: 45978 - protein, 9 aa, synthetic construct
PSNAVLHVH

SEQ ID NO: 45979 - protein, 9 aa, synthetic construct
PLNATGKLK

SEQ ID NO: 45980 - protein, 9 aa, synthetic construct
PLNASIRVK

SEQ ID NO: 45981 - protein, 9 aa, synthetic construct
PSPGALHLY

SEQ ID NO: 45982 - protein, 9 aa, synthetic construct
PSPGSLKVH

SEQ ID NO: 45983 - protein, 9 aa, synthetic construct
PLNAVLHVK

SEQ ID NO: 45984 - protein, 9 aa, synthetic construct
PSPGVVRVR

SEQ ID NO: 45985 - protein, 9 aa, synthetic construct
PSPAAVHLF

SEQ ID NO: 45986 - protein, 9 aa, synthetic construct
PSPAVVRLR

SEQ ID NO: 45987 - protein, 9 aa, synthetic construct
PSPAVVRVR

SEQ ID NO: 45988 - protein, 9 aa, synthetic construct
PSPAVVRVK

SEQ ID NO: 45989 - protein, 9 aa, synthetic construct
PSPAVLRVR

SEQ ID NO: 45990 - protein, 9 aa, synthetic construct
PSPAVAHLF

SEQ ID NO: 45991 - protein, 9 aa, synthetic construct
PSPAVIHLR

SEQ ID NO: 45992 - protein, 9 aa, synthetic construct
PSPAVIRLY

SEQ ID NO: 45993 - protein, 9 aa, synthetic construct
PANGAVKVR

SEQ ID NO: 45994 - protein, 9 aa, synthetic construct
PANGTAKVR

SEQ ID NO: 45995 - protein, 9 aa, synthetic construct
PANGGLRLY

SEQ ID NO: 45996 - protein, 9 aa, synthetic construct
PANAVVRVR

SEQ ID NO: 45997 - protein, 9 aa, synthetic construct
PAPASVHLH

SEQ ID NO: 45998 - protein, 9 aa, synthetic construct
PVNGVVRVR

SEQ ID NO: 45999 - protein, 9 aa, synthetic construct
PLNGTLRLY

SEQ ID NO: 46000 - protein, 9 aa, synthetic construct
PVNATIKVR

SEQ ID NO: 46001 - protein, 9 aa, synthetic construct
PVNATGRLK

SEQ ID NO: 46002 - protein, 9 aa, synthetic construct
PVNAVVRVR

SEQ ID NO: 46003 - protein, 9 aa, synthetic construct
PVQGSLHVY

SEQ ID NO: 46004 - protein, 9 aa, synthetic construct
PVQGVVRVR

SEQ ID NO: 46005 - protein, 9 aa, synthetic construct
PVQAGVHLH

SEQ ID NO: 46006 - protein, 9 aa, synthetic construct
PVPGVVRVR

SEQ ID NO: 46007 - protein, 9 aa, synthetic construct
PVPAAVRVR

SEQ ID NO: 46008 - protein, 9 aa, synthetic construct
PINGTAKVR

SEQ ID NO: 46009 - protein, 9 aa, synthetic construct
PINGSLRLF

SEQ ID NO: 46010 - protein, 9 aa, synthetic construct
PINGVIKVF

SEQ ID NO: 46011 - protein, 9 aa, synthetic construct
PIQAVVRVR

SEQ ID NO: 46012 - protein, 9 aa, synthetic construct
PIQAGLRLY

SEQ ID NO: 46013 - protein, 9 aa, synthetic construct
PIPGVLHVR

SEQ ID NO: 46014 - protein, 9 aa, synthetic construct
PIPATIKVR

SEQ ID NO: 46015 - protein, 9 aa, synthetic construct
GLNGVARLH

SEQ ID NO: 46016 - protein, 9 aa, synthetic construct
GLNATLKLR

SEQ ID NO: 46017 - protein, 9 aa, synthetic construct
GLNATLKLK

SEQ ID NO: 46018 - protein, 9 aa, synthetic construct
GLNAVIRLY

SEQ ID NO: 46019 - protein, 9 aa, synthetic construct
GTNGALHLY

SEQ ID NO: 46020 - protein, 9 aa, synthetic construct
GTNGTAKVR

SEQ ID NO: 46021 - protein, 9 aa, synthetic construct
GTNGTIKVR

SEQ ID NO: 46022 - protein, 9 aa, synthetic construct
GTNATIKVR

SEQ ID NO: 46023 - protein, 9 aa, synthetic construct
GTNASGHVY

SEQ ID NO: 46024 - protein, 9 aa, synthetic construct
GTNAVLHVH

SEQ ID NO: 46025 - protein, 9 aa, synthetic construct
GTQGGIRLR

SEQ ID NO: 46026 - protein, 9 aa, synthetic construct
GTQATIKVR

SEQ ID NO: 46027 - protein, 9 aa, synthetic construct
GTQASIKVR

SEQ ID NO: 46028 - protein, 9 aa, synthetic construct
GTPGTIKVR

SEQ ID NO: 46029 - protein, 9 aa, synthetic construct
GTPAVVRVR

SEQ ID NO: 46030 - protein, 9 aa, synthetic construct
GSNGVVRLY

SEQ ID NO: 46031 - protein, 9 aa, synthetic construct
GSNAVLHLY

SEQ ID NO: 46032 - protein, 9 aa, synthetic construct
GSNAVIRLY

SEQ ID NO: 46033 - protein, 9 aa, synthetic construct
GSQGAIRLR

SEQ ID NO: 46034 - protein, 9 aa, synthetic construct
GSQGSLHVY

SEQ ID NO: 46035 - protein, 9 aa, synthetic construct
GSQGSIRLR

SEQ ID NO: 46036 - protein, 9 aa, synthetic construct
GSQAGIRLR

SEQ ID NO: 46037 - protein, 9 aa, synthetic construct
GANGTIKVR

SEQ ID NO: 46038 - protein, 9 aa, synthetic construct
GANATIHLF

SEQ ID NO: 46039 - protein, 9 aa, synthetic construct
GANATIKVR

SEQ ID NO: 46040 - protein, 9 aa, synthetic construct
GANAVLHVH

SEQ ID NO: 46041 - protein, 9 aa, synthetic construct
GAQGGIRLR

SEQ ID NO: 46042 - protein, 9 aa, synthetic construct
GAQATIRVY

SEQ ID NO: 46043 - protein, 9 aa, synthetic construct
GAQAVVHVH

SEQ ID NO: 46044 - protein, 9 aa, synthetic construct
GAPGTIKVR

SEQ ID NO: 46045 - protein, 9 aa, synthetic construct
GAPGSGHLY

SEQ ID NO: 46046 - protein, 9 aa, synthetic construct
PLPAGLKVR

SEQ ID NO: 46047 - protein, 9 aa, synthetic construct
PLPAGLKVK

SEQ ID NO: 46048 - protein, 9 aa, synthetic construct
GAPATIKVR

SEQ ID NO: 46049 - protein, 9 aa, synthetic construct
GAPAVVRVR

SEQ ID NO: 46050 - protein, 9 aa, synthetic construct
GAPAGAHLK

SEQ ID NO: 46051 - protein, 9 aa, synthetic construct
GAPAGIHLH

SEQ ID NO: 46052 - protein, 9 aa, synthetic construct
GVNGALHVF

SEQ ID NO: 46053 - protein, 9 aa, synthetic construct
GVNATLKLR

SEQ ID NO: 46054 - protein, 9 aa, synthetic construct
GVQGGIRLR

SEQ ID NO: 46055 - protein, 9 aa, synthetic construct
GVQATGKVF

SEQ ID NO: 46056 - protein, 9 aa, synthetic construct
PTNGSAKVR

SEQ ID NO: 46057 - protein, 9 aa, synthetic construct
PTNGVVRVR

SEQ ID NO: 46058 - protein, 9 aa, synthetic construct
GINAVVRVY

SEQ ID NO: 46059 - protein, 9 aa, synthetic construct
GINAVLHVH

SEQ ID NO: 46060 - protein, 9 aa, synthetic construct
GINAVIRLY

SEQ ID NO: 46061 - protein, 9 aa, synthetic construct
GIQGSGRVR

SEQ ID NO: 46062 - protein, 9 aa, synthetic construct
GIPAVVRVY

SEQ ID NO: 46063 - protein, 9 aa, synthetic construct
GIPAVVRVR

SEQ ID NO: 46064 - protein, 9 aa, synthetic construct
GIPAVIRLH

SEQ ID NO: 46065 - protein, 9 aa, synthetic construct
GIPAVIRVF

SEQ ID NO: 46066 - protein, 9 aa, synthetic construct
PLNGATHVY

SEQ ID NO: 46067 - protein, 9 aa, synthetic construct
PLNGVSRLH

SEQ ID NO: 46068 - protein, 9 aa, synthetic construct
PLNGVTRLY

SEQ ID NO: 46069 - protein, 9 aa, synthetic construct
PTNATLKLR

SEQ ID NO: 46070 - protein, 9 aa, synthetic construct
PTNATIRVR

SEQ ID NO: 46071 - protein, 9 aa, synthetic construct
PTNASVHLF

SEQ ID NO: 46072 - protein, 9 aa, synthetic construct
PTNASIKVR

SEQ ID NO: 46073 - protein, 9 aa, synthetic construct
PTNAVVRVR

SEQ ID NO: 46074 - protein, 9 aa, synthetic construct
PTPAVVRVR

SEQ ID NO: 46075 - protein, 9 aa, synthetic construct
PTPAGGKLK

SEQ ID NO: 46076 - protein, 9 aa, synthetic construct
PSNGSLKVH

SEQ ID NO: 46077 - protein, 9 aa, synthetic construct
PSNGVVRVR

SEQ ID NO: 46078 - protein, 9 aa, synthetic construct
PSNGVIRVF

SEQ ID NO: 46079 - protein, 9 aa, synthetic construct
PSNASLHLH

SEQ ID NO: 46080 - protein, 9 aa, synthetic construct
PSNAVVHVY

SEQ ID NO: 46081 - protein, 9 aa, synthetic construct
PLNASVKVR

SEQ ID NO: 46082 - protein, 9 aa, synthetic construct
PSQGVGHVF

SEQ ID NO: 46083 - protein, 9 aa, synthetic construct
PSQATVRLY

SEQ ID NO: 46084 - protein, 9 aa, synthetic construct
PSPGAVKVK

SEQ ID NO: 46085 - protein, 9 aa, synthetic construct
PSPGALHLR

SEQ ID NO: 46086 - protein, 9 aa, synthetic construct
PSPGAIHLF

SEQ ID NO: 46087 - protein, 9 aa, synthetic construct
PSPGTVKLK

SEQ ID NO: 46088 - protein, 9 aa, synthetic construct
PSPGTLHLY

SEQ ID NO: 46089 - protein, 9 aa, synthetic construct
PSPGTLHLR

SEQ ID NO: 46090 - protein, 9 aa, synthetic construct
PSPGTLHLH

SEQ ID NO: 46091 - protein, 9 aa, synthetic construct
PLNGAGRLK

SEQ ID NO: 46092 - protein, 9 aa, synthetic construct
PANGAVRLK

SEQ ID NO: 46093 - protein, 9 aa, synthetic construct
PANGSVKLK

SEQ ID NO: 46094 - protein, 9 aa, synthetic construct
PANASARLR

SEQ ID NO: 46095 - protein, 9 aa, synthetic construct
PANAVLHVH

SEQ ID NO: 46096 - protein, 9 aa, synthetic construct
PAQGTVRLK

SEQ ID NO: 46097 - protein, 9 aa, synthetic construct
PLNGAVRVK

SEQ ID NO: 46098 - protein, 9 aa, synthetic construct
PVNGAVRVK

SEQ ID NO: 46099 - protein, 9 aa, synthetic construct
PVNGTARLK

SEQ ID NO: 46100 - protein, 9 aa, synthetic construct
PLNGTLRVR

SEQ ID NO: 46101 - protein, 9 aa, synthetic construct
PVQGVVRVK

SEQ ID NO: 46102 - protein, 9 aa, synthetic construct
PVPGAVRVK

SEQ ID NO: 46103 - protein, 9 aa, synthetic construct
PVPGTARLK

SEQ ID NO: 46104 - protein, 9 aa, synthetic construct
PINGAVRVK

SEQ ID NO: 46105 - protein, 9 aa, synthetic construct
PINASLHLR

SEQ ID NO: 46106 - protein, 9 aa, synthetic construct
PINASARLR

SEQ ID NO: 46107 - protein, 9 aa, synthetic construct
PINASGKLR

SEQ ID NO: 46108 - protein, 9 aa, synthetic construct
PIQGVIHLY

SEQ ID NO: 46109 - protein, 9 aa, synthetic construct
PIPGSIKVK

SEQ ID NO: 46110 - protein, 9 aa, synthetic construct
PIPASARLR

SEQ ID NO: 46111 - protein, 9 aa, synthetic construct
GLNGTLKLK

SEQ ID NO: 46112 - protein, 9 aa, synthetic construct
GLNGTARLK

SEQ ID NO: 46113 - protein, 9 aa, synthetic construct
GLQGSIHVY

SEQ ID NO: 46114 - protein, 9 aa, synthetic construct
GLQGGLKLY

SEQ ID NO: 46115 - protein, 9 aa, synthetic construct
GLQATAHVF

SEQ ID NO: 46116 - protein, 9 aa, synthetic construct
GLPAVAKVY

SEQ ID NO: 46117 - protein, 9 aa, synthetic construct
GTNGTARVK

SEQ ID NO: 46118 - protein, 9 aa, synthetic construct
GTNGTIKVH

SEQ ID NO: 46119 - protein, 9 aa, synthetic construct
GTQGVVKVK

SEQ ID NO: 46120 - protein, 9 aa, synthetic construct
PLPGSLKVY

SEQ ID NO: 46121 - protein, 9 aa, synthetic construct
PLPGSIKVR

SEQ ID NO: 46122 - protein, 9 aa, synthetic construct
GTQAVIKVH

SEQ ID NO: 46123 - protein, 9 aa, synthetic construct
GTPGVLRVK

SEQ ID NO: 46124 - protein, 9 aa, synthetic construct
PLPGGLRLY

SEQ ID NO: 46125 - protein, 9 aa, synthetic construct
GSNATVRLY

SEQ ID NO: 46126 - protein, 9 aa, synthetic construct
GSQGVLRVK

SEQ ID NO: 46127 - protein, 9 aa, synthetic construct
GSPGAVRVK

SEQ ID NO: 46128 - protein, 9 aa, synthetic construct
GSPGTVKLR

SEQ ID NO: 46129 - protein, 9 aa, synthetic construct
GSPGTARLK

SEQ ID NO: 46130 - protein, 9 aa, synthetic construct
GSPGVLHLR

SEQ ID NO: 46131 - protein, 9 aa, synthetic construct
GSPGVLRVY

SEQ ID NO: 46132 - protein, 9 aa, synthetic construct
GSPATVKVK

SEQ ID NO: 46133 - protein, 9 aa, synthetic construct
GSPAVVHLF

SEQ ID NO: 46134 - protein, 9 aa, synthetic construct
GSPAVLHVY

SEQ ID NO: 46135 - protein, 9 aa, synthetic construct
GSPAVLRVK

SEQ ID NO: 46136 - protein, 9 aa, synthetic construct
GANGAVRVK

SEQ ID NO: 46137 - protein, 9 aa, synthetic construct
GANGSVRLY

SEQ ID NO: 46138 - protein, 9 aa, synthetic construct
GANGVLRVK

SEQ ID NO: 46139 - protein, 9 aa, synthetic construct
GANGGLHLY

SEQ ID NO: 46140 - protein, 9 aa, synthetic construct
PLPASARLR

SEQ ID NO: 46141 - protein, 9 aa, synthetic construct
GANASIHVH

SEQ ID NO: 46142 - protein, 9 aa, synthetic construct
GAQGTLRVF

SEQ ID NO: 46143 - protein, 9 aa, synthetic construct
GAQGVLRVR

SEQ ID NO: 46144 - protein, 9 aa, synthetic construct
GAQATLRLY

SEQ ID NO: 46145 - protein, 9 aa, synthetic construct
GAPGAARLK

SEQ ID NO: 46146 - protein, 9 aa, synthetic construct
GAPGAIRLH

SEQ ID NO: 46147 - protein, 9 aa, synthetic construct
GAPGTARLR

SEQ ID NO: 46148 - protein, 9 aa, synthetic construct
GAPGTARLK

SEQ ID NO: 46149 - protein, 9 aa, synthetic construct
GAPGTARVK

SEQ ID NO: 46150 - protein, 9 aa, synthetic construct
GAPATARLK

SEQ ID NO: 46151 - protein, 9 aa, synthetic construct
GVNGTARLK

SEQ ID NO: 46152 - protein, 9 aa, synthetic construct
GVQAGGHVH

SEQ ID NO: 46153 - protein, 9 aa, synthetic construct
GVPGAIRLY

SEQ ID NO: 46154 - protein, 9 aa, synthetic construct
GVPGTVRLR

SEQ ID NO: 46155 - protein, 9 aa, synthetic construct
GVPGTVKLK

SEQ ID NO: 46156 - protein, 9 aa, synthetic construct
GVPGTARLK

SEQ ID NO: 46157 - protein, 9 aa, synthetic construct
GVPGTIRLF

SEQ ID NO: 46158 - protein, 9 aa, synthetic construct
GVPGSIRLY

SEQ ID NO: 46159 - protein, 9 aa, synthetic construct
GVPGVLRVK

SEQ ID NO: 46160 - protein, 9 aa, synthetic construct
GVPAVAKLK

SEQ ID NO: 46161 - protein, 9 aa, synthetic construct
GINGAVRVK

SEQ ID NO: 46162 - protein, 9 aa, synthetic construct
GINGAVKVR

SEQ ID NO: 46163 - protein, 9 aa, synthetic construct
GIQGSGKLK

SEQ ID NO: 46164 - protein, 9 aa, synthetic construct
GIPASGKLK

SEQ ID NO: 46165 - protein, 9 aa, synthetic construct
GIPASGKVR

SEQ ID NO: 46166 - protein, 9 aa, synthetic construct
GIPAGVKVR

SEQ ID NO: 46167 - protein, 9 aa, synthetic construct
GIPAGIRVY

SEQ ID NO: 46168 - protein, 9 aa, synthetic construct
GIPAGGKLK

SEQ ID NO: 46169 - protein, 9 aa, synthetic construct
PLNGGSHLK

SEQ ID NO: 46170 - protein, 9 aa, synthetic construct
PLQGASHVY

SEQ ID NO: 46171 - protein, 9 aa, synthetic construct
PTNGVSKLK

SEQ ID NO: 46172 - protein, 9 aa, synthetic construct
PTNASARLR

SEQ ID NO: 46173 - protein, 9 aa, synthetic construct
PLNGGLHLK

SEQ ID NO: 46174 - protein, 9 aa, synthetic construct
PSQGTVHLF

SEQ ID NO: 46175 - protein, 9 aa, synthetic construct
PSQGVVKLK

SEQ ID NO: 46176 - protein, 9 aa, synthetic construct
PSQGGVHLF

SEQ ID NO: 46177 - protein, 9 aa, synthetic construct
PSQGGAHLH

SEQ ID NO: 46178 - protein, 9 aa, synthetic construct
PLNASARVK

SEQ ID NO: 46179 - protein, 9 aa, synthetic construct
PSQATVHLF

SEQ ID NO: 46180 - protein, 9 aa, synthetic construct
PSQASIKVY

SEQ ID NO: 46181 - protein, 9 aa, synthetic construct
PSPGSLKLF

SEQ ID NO: 46182 - protein, 9 aa, synthetic construct
PANATLHLH

SEQ ID NO: 46183 - protein, 9 aa, synthetic construct
PANATLRVF

SEQ ID NO: 46184 - protein, 9 aa, synthetic construct
PANATARVK

SEQ ID NO: 46185 - protein, 9 aa, synthetic construct
PANAVGRVK

SEQ ID NO: 46186 - protein, 9 aa, synthetic construct
PANAVGKVK

SEQ ID NO: 46187 - protein, 9 aa, synthetic construct
PAQGSARVK

SEQ ID NO: 46188 - protein, 9 aa, synthetic construct
PAQGVVKLK

SEQ ID NO: 46189 - protein, 9 aa, synthetic construct
PAQGVGRVK

SEQ ID NO: 46190 - protein, 9 aa, synthetic construct
PAPGVARLR

SEQ ID NO: 46191 - protein, 9 aa, synthetic construct
PAPGGARLR

SEQ ID NO: 46192 - protein, 9 aa, synthetic construct
PVNGSGRVK

SEQ ID NO: 46193 - protein, 9 aa, synthetic construct
PVNAALHLR

SEQ ID NO: 46194 - protein, 9 aa, synthetic construct
PVNATLRVF

SEQ ID NO: 46195 - protein, 9 aa, synthetic construct
PVQGSARVK

SEQ ID NO: 46196 - protein, 9 aa, synthetic construct
PVQGVGRLK

SEQ ID NO: 46197 - protein, 9 aa, synthetic construct
PVQGVGRVR

SEQ ID NO: 46198 - protein, 9 aa, synthetic construct
PVQATARVK

SEQ ID NO: 46199 - protein, 9 aa, synthetic construct
PLNGTLKVY

SEQ ID NO: 46200 - protein, 9 aa, synthetic construct
PVQAGVKLK

SEQ ID NO: 46201 - protein, 9 aa, synthetic construct
PVQAGARVK

SEQ ID NO: 46202 - protein, 9 aa, synthetic construct
PVPATLRVF

SEQ ID NO: 46203 - protein, 9 aa, synthetic construct
PVPAVVHLF

SEQ ID NO: 46204 - protein, 9 aa, synthetic construct
PINGSARVK

SEQ ID NO: 46205 - protein, 9 aa, synthetic construct
PINAVIRVF

SEQ ID NO: 46206 - protein, 9 aa, synthetic construct
PIQGTLHLF

SEQ ID NO: 46207 - protein, 9 aa, synthetic construct
PIQGVVKLK

SEQ ID NO: 46208 - protein, 9 aa, synthetic construct
PIQGVGRVK

SEQ ID NO: 46209 - protein, 9 aa, synthetic construct
GLNGALRVF

SEQ ID NO: 46210 - protein, 9 aa, synthetic construct
GLNGVVRLH

SEQ ID NO: 46211 - protein, 9 aa, synthetic construct
GLNGVLRVH

SEQ ID NO: 46212 - protein, 9 aa, synthetic construct
GLNGVAHLR

SEQ ID NO: 46213 - protein, 9 aa, synthetic construct
GLNATLRVF

SEQ ID NO: 46214 - protein, 9 aa, synthetic construct
GLNAVVRLH

SEQ ID NO: 46215 - protein, 9 aa, synthetic construct
GLNAVIRVF

SEQ ID NO: 46216 - protein, 9 aa, synthetic construct
GLNAVGHLF

SEQ ID NO: 46217 - protein, 9 aa, synthetic construct
GLQAVIHLH

SEQ ID NO: 46218 - protein, 9 aa, synthetic construct
GLPGAARLR

SEQ ID NO: 46219 - protein, 9 aa, synthetic construct
GLPGTLRVF

SEQ ID NO: 46220 - protein, 9 aa, synthetic construct
GLPGTAKLR

SEQ ID NO: 46221 - protein, 9 aa, synthetic construct
GLPGSVHVR

SEQ ID NO: 46222 - protein, 9 aa, synthetic construct
GLPGVAKLH

SEQ ID NO: 46223 - protein, 9 aa, synthetic construct
PLPGTLRVF

SEQ ID NO: 46224 - protein, 9 aa, synthetic construct
GTQGVVKLK

SEQ ID NO: 46225 - protein, 9 aa, synthetic construct
GTQATVHLF

SEQ ID NO: 46226 - protein, 9 aa, synthetic construct
GTPGAARLR

SEQ ID NO: 46227 - protein, 9 aa, synthetic construct
GTPAVVHLR

SEQ ID NO: 46228 - protein, 9 aa, synthetic construct
GSQGSGHVY

SEQ ID NO: 46229 - protein, 9 aa, synthetic construct
GSQASIHLH

SEQ ID NO: 46230 - protein, 9 aa, synthetic construct
GSQASIRVF

SEQ ID NO: 46231 - protein, 9 aa, synthetic construct
GSPAGLRVY

SEQ ID NO: 46232 - protein, 9 aa, synthetic construct
GSPAGLRVH

SEQ ID NO: 46233 - protein, 9 aa, synthetic construct
GSPAGLRVK

SEQ ID NO: 46234 - protein, 9 aa, synthetic construct
GANGAVRLY

SEQ ID NO: 46235 - protein, 9 aa, synthetic construct
GANATLRVF

SEQ ID NO: 46236 - protein, 9 aa, synthetic construct
GAQGVVKLK

SEQ ID NO: 46237 - protein, 9 aa, synthetic construct
GAPGAARLR

SEQ ID NO: 46238 - protein, 9 aa, synthetic construct
GAPATIRLH

SEQ ID NO: 46239 - protein, 9 aa, synthetic construct
GVNGAARLR

SEQ ID NO: 46240 - protein, 9 aa, synthetic construct
PLNGVVRLR

SEQ ID NO: 46241 - protein, 9 aa, synthetic construct
GVQASARVK

SEQ ID NO: 46242 - protein, 9 aa, synthetic construct
GVQAVIHLY

SEQ ID NO: 46243 - protein, 9 aa, synthetic construct
PTNGSARVK

SEQ ID NO: 46244 - protein, 9 aa, synthetic construct
GVPAVVHLR

SEQ ID NO: 46245 - protein, 9 aa, synthetic construct
GVPAVIRVF

SEQ ID NO: 46246 - protein, 9 aa, synthetic construct
GINGVGHLF

SEQ ID NO: 46247 - protein, 9 aa, synthetic construct
GINATLRVF

SEQ ID NO: 46248 - protein, 9 aa, synthetic construct
GINASGHVR

SEQ ID NO: 46249 - protein, 9 aa, synthetic construct
PTNGVGRVK

SEQ ID NO: 46250 - protein, 9 aa, synthetic construct
GIQASARVK

SEQ ID NO: 46251 - protein, 9 aa, synthetic construct
GIPGAGRLR

SEQ ID NO: 46252 - protein, 9 aa, synthetic construct
GIPGTARLR

SEQ ID NO: 46253 - protein, 9 aa, synthetic construct
GIPAVVHLF

SEQ ID NO: 46254 - protein, 9 aa, synthetic construct
PTNGTSKVY

SEQ ID NO: 46255 - protein, 9 aa, synthetic construct
PLNGVGRVK

SEQ ID NO: 46256 - protein, 9 aa, synthetic construct
PTQGVLKLK

SEQ ID NO: 46257 - protein, 9 aa, synthetic construct
PTPAVVHLR

SEQ ID NO: 46258 - protein, 9 aa, synthetic construct
PSNGVLRVH

SEQ ID NO: 46259 - protein, 9 aa, synthetic construct
PLNATIRVK

SEQ ID NO: 46260 - protein, 9 aa, synthetic construct
PSNASIRVK

SEQ ID NO: 46261 - protein, 9 aa, synthetic construct
PSNASIKLK

SEQ ID NO: 46262 - protein, 9 aa, synthetic construct
PSQGGAHVH

SEQ ID NO: 46263 - protein, 9 aa, synthetic construct
PSQAAVHVY

SEQ ID NO: 46264 - protein, 9 aa, synthetic construct
PLNASIRLK

SEQ ID NO: 46265 - protein, 9 aa, synthetic construct
PLNASIRLF

SEQ ID NO: 46266 - protein, 9 aa, synthetic construct
PLNASIRVR

SEQ ID NO: 46267 - protein, 9 aa, synthetic construct
PSQAVGHVY

SEQ ID NO: 46268 - protein, 9 aa, synthetic construct
PSPGSIRVK

SEQ ID NO: 46269 - protein, 9 aa, synthetic construct
PSPAAVHLY

SEQ ID NO: 46270 - protein, 9 aa, synthetic construct
PSPASIRVK

SEQ ID NO: 46271 - protein, 9 aa, synthetic construct
PSPASGHVF

SEQ ID NO: 46272 - protein, 9 aa, synthetic construct
PAQGGLKLK

SEQ ID NO: 46273 - protein, 9 aa, synthetic construct
PLQGTVRLF

SEQ ID NO: 46274 - protein, 9 aa, synthetic construct
PVPGALHLY

SEQ ID NO: 46275 - protein, 9 aa, synthetic construct
PVPGSIRVK

SEQ ID NO: 46276 - protein, 9 aa, synthetic construct
PIQGSGRVR

SEQ ID NO: 46277 - protein, 9 aa, synthetic construct
PLQASIRVK

SEQ ID NO: 46278 - protein, 9 aa, synthetic construct
GLNAAARVK

SEQ ID NO: 46279 - protein, 9 aa, synthetic construct
GLNAAAKVR

SEQ ID NO: 46280 - protein, 9 aa, synthetic construct
GLNASIKLK

SEQ ID NO: 46281 - protein, 9 aa, synthetic construct
GLPATLHLY

SEQ ID NO: 46282 - protein, 9 aa, synthetic construct
GTQGSGRVR

SEQ ID NO: 46283 - protein, 9 aa, synthetic construct
GTPASIRVK

SEQ ID NO: 46284 - protein, 9 aa, synthetic construct
GSQGSLHLH

SEQ ID NO: 46285 - protein, 9 aa, synthetic construct
GSQAVAKLY

SEQ ID NO: 46286 - protein, 9 aa, synthetic construct
GSPGSIRVK

SEQ ID NO: 46287 - protein, 9 aa, synthetic construct
PLNGALRLR

SEQ ID NO: 46288 - protein, 9 aa, synthetic construct
GANATIHLY

SEQ ID NO: 46289 - protein, 9 aa, synthetic construct
GANATIHVF

SEQ ID NO: 46290 - protein, 9 aa, synthetic construct
GANATIRVK

SEQ ID NO: 46291 - protein, 9 aa, synthetic construct
GINGSGHLR

SEQ ID NO: 46292 - protein, 9 aa, synthetic construct
GINASGHVK

SEQ ID NO: 46293 - protein, 9 aa, synthetic construct
GINAVLRVY

SEQ ID NO: 46294 - protein, 9 aa, synthetic construct
GIQGSGKVR

SEQ ID NO: 46295 - protein, 9 aa, synthetic construct
PTNATIRVK

SEQ ID NO: 46296 - protein, 9 aa, synthetic construct
PTQGVVRVK

SEQ ID NO: 46297 - protein, 9 aa, synthetic construct
PTPASIRVK

SEQ ID NO: 46298 - protein, 9 aa, synthetic construct
PLNATLKVF

SEQ ID NO: 46299 - protein, 9 aa, synthetic construct
PLNGAVRVR

SEQ ID NO: 46300 - protein, 9 aa, synthetic construct
PLNGALHVF

SEQ ID NO: 46301 - protein, 9 aa, synthetic construct
PLNGALRLH

SEQ ID NO: 46302 - protein, 9 aa, synthetic construct
PLNGALRLK

SEQ ID NO: 46303 - protein, 9 aa, synthetic construct
PLNGALRLF

SEQ ID NO: 46304 - protein, 9 aa, synthetic construct
PLNGALKLY

SEQ ID NO: 46305 - protein, 9 aa, synthetic construct
PLNGALKLK

SEQ ID NO: 46306 - protein, 9 aa, synthetic construct
PLNGAARVK

SEQ ID NO: 46307 - protein, 9 aa, synthetic construct
PLNGAIRLK

SEQ ID NO: 46308 - protein, 9 aa, synthetic construct
PLNGAGRLR

SEQ ID NO: 46309 - protein, 9 aa, synthetic construct
PLNGAGKLK

SEQ ID NO: 46310 - protein, 9 aa, synthetic construct
PLNGTVRLR

SEQ ID NO: 46311 - protein, 9 aa, synthetic construct
PLNGTVRVR

SEQ ID NO: 46312 - protein, 9 aa, synthetic construct
PLNGTLRVH

SEQ ID NO: 46313 - protein, 9 aa, synthetic construct
PLNGTLKVR

SEQ ID NO: 46314 - protein, 9 aa, synthetic construct
PLNGTARLR

SEQ ID NO: 46315 - protein, 9 aa, synthetic construct
PLNGTARVK

SEQ ID NO: 46316 - protein, 9 aa, synthetic construct
PLNGTAKVR

SEQ ID NO: 46317 - protein, 9 aa, synthetic construct
PLNGTIHLF

SEQ ID NO: 46318 - protein, 9 aa, synthetic construct
PLNGTIKLK

SEQ ID NO: 46319 - protein, 9 aa, synthetic construct
PLNGTGKLR

SEQ ID NO: 46320 - protein, 9 aa, synthetic construct
PLNGSVRLR

SEQ ID NO: 46321 - protein, 9 aa, synthetic construct
PLNGSVRLK

SEQ ID NO: 46322 - protein, 9 aa, synthetic construct
PLNGSVRVR

SEQ ID NO: 46323 - protein, 9 aa, synthetic construct
PLNGSLRLR

SEQ ID NO: 46324 - protein, 9 aa, synthetic construct
PLNGSLRLH

SEQ ID NO: 46325 - protein, 9 aa, synthetic construct
PLNGSLRLK

SEQ ID NO: 46326 - protein, 9 aa, synthetic construct
PLNGSLRVR

SEQ ID NO: 46327 - protein, 9 aa, synthetic construct
PLNGSLRVK

SEQ ID NO: 46328 - protein, 9 aa, synthetic construct
PLNGSLKLK

SEQ ID NO: 46329 - protein, 9 aa, synthetic construct
PLNGSLKVK

SEQ ID NO: 46330 - protein, 9 aa, synthetic construct
PLNGSARLR

SEQ ID NO: 46331 - protein, 9 aa, synthetic construct
PLNGSARLK

SEQ ID NO: 46332 - protein, 9 aa, synthetic construct
PLNGSARVK

SEQ ID NO: 46333 - protein, 9 aa, synthetic construct
PLNGSAKVR

SEQ ID NO: 46334 - protein, 9 aa, synthetic construct
PLNGSIRLY

SEQ ID NO: 46335 - protein, 9 aa, synthetic construct
PLNGSIRLR

SEQ ID NO: 46336 - protein, 9 aa, synthetic construct
PLNGSIRLK

SEQ ID NO: 46337 - protein, 9 aa, synthetic construct
PLNGSGRVK

SEQ ID NO: 46338 - protein, 9 aa, synthetic construct
PLNGVVRVR

SEQ ID NO: 46339 - protein, 9 aa, synthetic construct
PLNGVVRVK

SEQ ID NO: 46340 - protein, 9 aa, synthetic construct
PLNGVVKLR

SEQ ID NO: 46341 - protein, 9 aa, synthetic construct
PLNGVVKVR

SEQ ID NO: 46342 - protein, 9 aa, synthetic construct
PLNGVVKVK

SEQ ID NO: 46343 - protein, 9 aa, synthetic construct
PLNGVLRLR

SEQ ID NO: 46344 - protein, 9 aa, synthetic construct
PLNGVLRVR

SEQ ID NO: 46345 - protein, 9 aa, synthetic construct
PLNGVLRVK

SEQ ID NO: 46346 - protein, 9 aa, synthetic construct
PLNGVARLH

SEQ ID NO: 46347 - protein, 9 aa, synthetic construct
PLNGVARLK

SEQ ID NO: 46348 - protein, 9 aa, synthetic construct
PLNGVARVK

SEQ ID NO: 46349 - protein, 9 aa, synthetic construct
PLNGVAKLR

SEQ ID NO: 46350 - protein, 9 aa, synthetic construct
PLNGVAKLK

SEQ ID NO: 46351 - protein, 9 aa, synthetic construct
PLNGVAKVK

SEQ ID NO: 46352 - protein, 9 aa, synthetic construct
PLNGVIHLY

SEQ ID NO: 46353 - protein, 9 aa, synthetic construct
PLNGVIRVR

SEQ ID NO: 46354 - protein, 9 aa, synthetic construct
PLNGVIRVK

SEQ ID NO: 46355 - protein, 9 aa, synthetic construct
PLNGVGRLR

SEQ ID NO: 46356 - protein, 9 aa, synthetic construct
PLNGVGKVR

SEQ ID NO: 46357 - protein, 9 aa, synthetic construct
PLNGGVHVH

SEQ ID NO: 46358 - protein, 9 aa, synthetic construct
PLNGGVRVR

SEQ ID NO: 46359 - protein, 9 aa, synthetic construct
PLNGGLHLY

SEQ ID NO: 46360 - protein, 9 aa, synthetic construct
PLNGGLRLY

SEQ ID NO: 46361 - protein, 9 aa, synthetic construct
PLNGGLRLR

SEQ ID NO: 46362 - protein, 9 aa, synthetic construct
PLNGGLRLK

SEQ ID NO: 46363 - protein, 9 aa, synthetic construct
PLNGGLRLF

SEQ ID NO: 46364 - protein, 9 aa, synthetic construct
PLNGGLRVY

SEQ ID NO: 46365 - protein, 9 aa, synthetic construct
PLNGGLRVR

SEQ ID NO: 46366 - protein, 9 aa, synthetic construct
PLNGGLRVH

SEQ ID NO: 46367 - protein, 9 aa, synthetic construct
PLNGGLRVK

SEQ ID NO: 46368 - protein, 9 aa, synthetic construct
PLNGGLRVF

SEQ ID NO: 46369 - protein, 9 aa, synthetic construct
PLNGGLKLR

SEQ ID NO: 46370 - protein, 9 aa, synthetic construct
PLNGGLKLK

SEQ ID NO: 46371 - protein, 9 aa, synthetic construct
PLNGGLKLF

SEQ ID NO: 46372 - protein, 9 aa, synthetic construct
PLNGGLKVR

SEQ ID NO: 46373 - protein, 9 aa, synthetic construct
PLNGGARLR

SEQ ID NO: 46374 - protein, 9 aa, synthetic construct
PLNGGARLK

SEQ ID NO: 46375 - protein, 9 aa, synthetic construct
PLNGGARVK

SEQ ID NO: 46376 - protein, 9 aa, synthetic construct
PLNGGAKLK

SEQ ID NO: 46377 - protein, 9 aa, synthetic construct
PLNGGAKVK

SEQ ID NO: 46378 - protein, 9 aa, synthetic construct
PLNGGGRLR

SEQ ID NO: 46379 - protein, 9 aa, synthetic construct
PLNAAVRLR

SEQ ID NO: 46380 - protein, 9 aa, synthetic construct
PLNAAVRLK

SEQ ID NO: 46381 - protein, 9 aa, synthetic construct
PLNAALHLY

SEQ ID NO: 46382 - protein, 9 aa, synthetic construct
PLNAALRVR

SEQ ID NO: 46383 - protein, 9 aa, synthetic construct
PLNAALKVR

SEQ ID NO: 46384 - protein, 9 aa, synthetic construct
PLNAALKVK

SEQ ID NO: 46385 - protein, 9 aa, synthetic construct
PLNAAARLR

SEQ ID NO: 46386 - protein, 9 aa, synthetic construct
PLNAAAKVR

SEQ ID NO: 46387 - protein, 9 aa, synthetic construct
PLNAAIRVR

SEQ ID NO: 46388 - protein, 9 aa, synthetic construct
PLNAAIRVK

SEQ ID NO: 46389 - protein, 9 aa, synthetic construct
PLNATVRLK

SEQ ID NO: 46390 - protein, 9 aa, synthetic construct
PLNATVRLF

SEQ ID NO: 46391 - protein, 9 aa, synthetic construct
PLNATLHLH

SEQ ID NO: 46392 - protein, 9 aa, synthetic construct
PLNATLHVY

SEQ ID NO: 46393 - protein, 9 aa, synthetic construct
PLNATLHVF

SEQ ID NO: 46394 - protein, 9 aa, synthetic construct
PLNATLRLY

SEQ ID NO: 46395 - protein, 9 aa, synthetic construct
PLNATLRLH

SEQ ID NO: 46396 - protein, 9 aa, synthetic construct
PLNATLRLK

SEQ ID NO: 46397 - protein, 9 aa, synthetic construct
PLNATLRVY

SEQ ID NO: 46398 - protein, 9 aa, synthetic construct
PLNATLRVR

SEQ ID NO: 46399 - protein, 9 aa, synthetic construct
PLNATLKLR

SEQ ID NO: 46400 - protein, 9 aa, synthetic construct
PLNATLKVR

SEQ ID NO: 46401 - protein, 9 aa, synthetic construct
PLNATARLR

SEQ ID NO: 46402 - protein, 9 aa, synthetic construct
PLNATAKVR

SEQ ID NO: 46403 - protein, 9 aa, synthetic construct
PLNATIRLK

SEQ ID NO: 46404 - protein, 9 aa, synthetic construct
PLNATGKVK

SEQ ID NO: 46405 - protein, 9 aa, synthetic construct
PLNASLHLY

SEQ ID NO: 46406 - protein, 9 aa, synthetic construct
PLNASLHVF

SEQ ID NO: 46407 - protein, 9 aa, synthetic construct
PLNASLRLY

SEQ ID NO: 46408 - protein, 9 aa, synthetic construct
PLNASLRLR

SEQ ID NO: 46409 - protein, 9 aa, synthetic construct
PLNASLRLK

SEQ ID NO: 46410 - protein, 9 aa, synthetic construct
PLNASLRVR

SEQ ID NO: 46411 - protein, 9 aa, synthetic construct
PLNASLKLK

SEQ ID NO: 46412 - protein, 9 aa, synthetic construct
PLNASARVR

SEQ ID NO: 46413 - protein, 9 aa, synthetic construct
PLNASIRLY

SEQ ID NO: 46414 - protein, 9 aa, synthetic construct
PLNASGRVR

SEQ ID NO: 46415 - protein, 9 aa, synthetic construct
PLNAVVKVR

SEQ ID NO: 46416 - protein, 9 aa, synthetic construct
PLNAVVKVK

SEQ ID NO: 46417 - protein, 9 aa, synthetic construct
PLNAVLHLY

SEQ ID NO: 46418 - protein, 9 aa, synthetic construct
PLNAVLHLR

SEQ ID NO: 46419 - protein, 9 aa, synthetic construct
PLNAVLHLK

SEQ ID NO: 46420 - protein, 9 aa, synthetic construct
PLNAVLHLF

SEQ ID NO: 46421 - protein, 9 aa, synthetic construct
PLNAVLRLY

SEQ ID NO: 46422 - protein, 9 aa, synthetic construct
PLNAVLRLR

SEQ ID NO: 46423 - protein, 9 aa, synthetic construct
PLNAVLRLK

SEQ ID NO: 46424 - protein, 9 aa, synthetic construct
PLNAVLRVK

SEQ ID NO: 46425 - protein, 9 aa, synthetic construct
PLNAVARLR

SEQ ID NO: 46426 - protein, 9 aa, synthetic construct
PLNAVARLH

SEQ ID NO: 46427 - protein, 9 aa, synthetic construct
PLNAVARLK

SEQ ID NO: 46428 - protein, 9 aa, synthetic construct
PLNAVARVR

SEQ ID NO: 46429 - protein, 9 aa, synthetic construct
PLNAVARVK

SEQ ID NO: 46430 - protein, 9 aa, synthetic construct
PLNAVAKLR

SEQ ID NO: 46431 - protein, 9 aa, synthetic construct
PLNAVAKLK

SEQ ID NO: 46432 - protein, 9 aa, synthetic construct
PLNAVAKVR

SEQ ID NO: 46433 - protein, 9 aa, synthetic construct
PLNAVIHLY

SEQ ID NO: 46434 - protein, 9 aa, synthetic construct
PLNAVIHLH

SEQ ID NO: 46435 - protein, 9 aa, synthetic construct
PLNAVIHLF

SEQ ID NO: 46436 - protein, 9 aa, synthetic construct
PLNAVIRVY

SEQ ID NO: 46437 - protein, 9 aa, synthetic construct
PLNAVIRVK

SEQ ID NO: 46438 - protein, 9 aa, synthetic construct
PLNAVIRVF

SEQ ID NO: 46439 - protein, 9 aa, synthetic construct
PLNAVIKLR

SEQ ID NO: 46440 - protein, 9 aa, synthetic construct
PLNAVIKVR

SEQ ID NO: 46441 - protein, 9 aa, synthetic construct
PLNAVGRVK

SEQ ID NO: 46442 - protein, 9 aa, synthetic construct
PLNAGVHLR

SEQ ID NO: 46443 - protein, 9 aa, synthetic construct
PLNAGVHLK

SEQ ID NO: 46444 - protein, 9 aa, synthetic construct
PLNAGVHLF

SEQ ID NO: 46445 - protein, 9 aa, synthetic construct
PLNAGVHVH

SEQ ID NO: 46446 - protein, 9 aa, synthetic construct
PLNAGVRLR

SEQ ID NO: 46447 - protein, 9 aa, synthetic construct
PLNAGVRLK

SEQ ID NO: 46448 - protein, 9 aa, synthetic construct
PLNAGLHLY

SEQ ID NO: 46449 - protein, 9 aa, synthetic construct
PLNAGLHLR

SEQ ID NO: 46450 - protein, 9 aa, synthetic construct
PLNAGLHLH

SEQ ID NO: 46451 - protein, 9 aa, synthetic construct
PLNAGLHLK

SEQ ID NO: 46452 - protein, 9 aa, synthetic construct
PLNAGLHLF

SEQ ID NO: 46453 - protein, 9 aa, synthetic construct
PLNAGLHVY

SEQ ID NO: 46454 - protein, 9 aa, synthetic construct
PLNAGLHVR

SEQ ID NO: 46455 - protein, 9 aa, synthetic construct
PLNAGLHVF

SEQ ID NO: 46456 - protein, 9 aa, synthetic construct
PLNAGLRLY

SEQ ID NO: 46457 - protein, 9 aa, synthetic construct
PLNAGLRLR

SEQ ID NO: 46458 - protein, 9 aa, synthetic construct
PLNAGLRLK

SEQ ID NO: 46459 - protein, 9 aa, synthetic construct
PLNAGLRLF

SEQ ID NO: 46460 - protein, 9 aa, synthetic construct
PLNAGLRVR

SEQ ID NO: 46461 - protein, 9 aa, synthetic construct
PLNAGLRVK

SEQ ID NO: 46462 - protein, 9 aa, synthetic construct
PLNAGLKLR

SEQ ID NO: 46463 - protein, 9 aa, synthetic construct
PLNAGLKLK

SEQ ID NO: 46464 - protein, 9 aa, synthetic construct
PLNAGARLR

SEQ ID NO: 46465 - protein, 9 aa, synthetic construct
PLNAGARLK

SEQ ID NO: 46466 - protein, 9 aa, synthetic construct
PLNAGAKLK

SEQ ID NO: 46467 - protein, 9 aa, synthetic construct
PLNAGAKVK

SEQ ID NO: 46468 - protein, 9 aa, synthetic construct
PLNAGGRLK

SEQ ID NO: 46469 - protein, 9 aa, synthetic construct
PLNAGGKVR

SEQ ID NO: 46470 - protein, 9 aa, synthetic construct
PLQGAVRLR

SEQ ID NO: 46471 - protein, 9 aa, synthetic construct
PLQGAVRLK

SEQ ID NO: 46472 - protein, 9 aa, synthetic construct
PLQGAVKLK

SEQ ID NO: 46473 - protein, 9 aa, synthetic construct
PLQGALRLR

SEQ ID NO: 46474 - protein, 9 aa, synthetic construct
PLQGALRLH

SEQ ID NO: 46475 - protein, 9 aa, synthetic construct
PLQGALRLK

SEQ ID NO: 46476 - protein, 9 aa, synthetic construct
PLQGALRVR

SEQ ID NO: 46477 - protein, 9 aa, synthetic construct
PLQGALRVH

SEQ ID NO: 46478 - protein, 9 aa, synthetic construct
PLQGALRVF

SEQ ID NO: 46479 - protein, 9 aa, synthetic construct
PLQGALKLR

SEQ ID NO: 46480 - protein, 9 aa, synthetic construct
PLQGALKLK

SEQ ID NO: 46481 - protein, 9 aa, synthetic construct
PLQGAARLR

SEQ ID NO: 46482 - protein, 9 aa, synthetic construct
PLQGAARVK

SEQ ID NO: 46483 - protein, 9 aa, synthetic construct
PLQGAAKLR

SEQ ID NO: 46484 - protein, 9 aa, synthetic construct
PLQGAAKVR

SEQ ID NO: 46485 - protein, 9 aa, synthetic construct
PLQGAAKVK

SEQ ID NO: 46486 - protein, 9 aa, synthetic construct
PLQGAGRLR

SEQ ID NO: 46487 - protein, 9 aa, synthetic construct
PLQGAGKLR

SEQ ID NO: 46488 - protein, 9 aa, synthetic construct
PLQGTVRVK

SEQ ID NO: 46489 - protein, 9 aa, synthetic construct
PLQGTVKLK

SEQ ID NO: 46490 - protein, 9 aa, synthetic construct
PLQGTLHVF

SEQ ID NO: 46491 - protein, 9 aa, synthetic construct
PLQGTLRLR

SEQ ID NO: 46492 - protein, 9 aa, synthetic construct
PLQGTLRLK

SEQ ID NO: 46493 - protein, 9 aa, synthetic construct
PLQGTLRVY

SEQ ID NO: 46494 - protein, 9 aa, synthetic construct
PLQGTLRVH

SEQ ID NO: 46495 - protein, 9 aa, synthetic construct
PLQGTLKVR

SEQ ID NO: 46496 - protein, 9 aa, synthetic construct
PLQGTLKVK

SEQ ID NO: 46497 - protein, 9 aa, synthetic construct
PLQGTARLR

SEQ ID NO: 46498 - protein, 9 aa, synthetic construct
PLQGTARLK

SEQ ID NO: 46499 - protein, 9 aa, synthetic construct
PLQGTARVR

SEQ ID NO: 46500 - protein, 9 aa, synthetic construct
PLQGTARVK

SEQ ID NO: 46501 - protein, 9 aa, synthetic construct
PLQGTAKLK

SEQ ID NO: 46502 - protein, 9 aa, synthetic construct
PLQGTAKVR

SEQ ID NO: 46503 - protein, 9 aa, synthetic construct
PLQGTIRLR

SEQ ID NO: 46504 - protein, 9 aa, synthetic construct
PLQGTIRLK

SEQ ID NO: 46505 - protein, 9 aa, synthetic construct
PLQGTIRVR

SEQ ID NO: 46506 - protein, 9 aa, synthetic construct
PLQGTIKLR

SEQ ID NO: 46507 - protein, 9 aa, synthetic construct
PLQGTIKVR

SEQ ID NO: 46508 - protein, 9 aa, synthetic construct
PLQGTGRVR

SEQ ID NO: 46509 - protein, 9 aa, synthetic construct
PLQGTGRVK

SEQ ID NO: 46510 - protein, 9 aa, synthetic construct
PLQGSVRLR

SEQ ID NO: 46511 - protein, 9 aa, synthetic construct
PLQGSVRLK

SEQ ID NO: 46512 - protein, 9 aa, synthetic construct
PLQGSVRVR

SEQ ID NO: 46513 - protein, 9 aa, synthetic construct
PLQGSVRVK

SEQ ID NO: 46514 - protein, 9 aa, synthetic construct
PLQGSVKLR

SEQ ID NO: 46515 - protein, 9 aa, synthetic construct
PLQGSVKVK

SEQ ID NO: 46516 - protein, 9 aa, synthetic construct
PLQGSLHLY

SEQ ID NO: 46517 - protein, 9 aa, synthetic construct
PLQGSLHVF

SEQ ID NO: 46518 - protein, 9 aa, synthetic construct
PLQGSLRLY

SEQ ID NO: 46519 - protein, 9 aa, synthetic construct
PLQGSLRLR

SEQ ID NO: 46520 - protein, 9 aa, synthetic construct
PLQGSLRLH

SEQ ID NO: 46521 - protein, 9 aa, synthetic construct
PLQGSLRLK

SEQ ID NO: 46522 - protein, 9 aa, synthetic construct
PLQGSLRLF

SEQ ID NO: 46523 - protein, 9 aa, synthetic construct
PLQGSLRVR

SEQ ID NO: 46524 - protein, 9 aa, synthetic construct
PLQGSLRVH

SEQ ID NO: 46525 - protein, 9 aa, synthetic construct
PLQGSLRVK

SEQ ID NO: 46526 - protein, 9 aa, synthetic construct
PLQGSLRVF

SEQ ID NO: 46527 - protein, 9 aa, synthetic construct
PLQGSLKLR

SEQ ID NO: 46528 - protein, 9 aa, synthetic construct
PLQGSLKLK

SEQ ID NO: 46529 - protein, 9 aa, synthetic construct
PLQGSLKLF

SEQ ID NO: 46530 - protein, 9 aa, synthetic construct
PLQGSLKVY

SEQ ID NO: 46531 - protein, 9 aa, synthetic construct
PLQGSLKVR

SEQ ID NO: 46532 - protein, 9 aa, synthetic construct
PLQGSLKVK

SEQ ID NO: 46533 - protein, 9 aa, synthetic construct
PLQGSARLY

SEQ ID NO: 46534 - protein, 9 aa, synthetic construct
PLQGSARLR

SEQ ID NO: 46535 - protein, 9 aa, synthetic construct
PLQGSARLK

SEQ ID NO: 46536 - protein, 9 aa, synthetic construct
PLQGSARVY

SEQ ID NO: 46537 - protein, 9 aa, synthetic construct
PLQGSARVR

SEQ ID NO: 46538 - protein, 9 aa, synthetic construct
PLQGSARVK

SEQ ID NO: 46539 - protein, 9 aa, synthetic construct
PLQGSAKLR

SEQ ID NO: 46540 - protein, 9 aa, synthetic construct
PLQGSAKLK

SEQ ID NO: 46541 - protein, 9 aa, synthetic construct
PLQGSAKVR

SEQ ID NO: 46542 - protein, 9 aa, synthetic construct
PLQGSIRLR

SEQ ID NO: 46543 - protein, 9 aa, synthetic construct
PLQGSIKLR

SEQ ID NO: 46544 - protein, 9 aa, synthetic construct
PLQGSIKLK

SEQ ID NO: 46545 - protein, 9 aa, synthetic construct
PLQGSGHVY

SEQ ID NO: 46546 - protein, 9 aa, synthetic construct
PLQGSGHVF

SEQ ID NO: 46547 - protein, 9 aa, synthetic construct
PLQGSGRLK

SEQ ID NO: 46548 - protein, 9 aa, synthetic construct
PLQGSGRVR

SEQ ID NO: 46549 - protein, 9 aa, synthetic construct
PLQGSGKLR

SEQ ID NO: 46550 - protein, 9 aa, synthetic construct
PLQGVVRLK

SEQ ID NO: 46551 - protein, 9 aa, synthetic construct
PLQGVVRVR

SEQ ID NO: 46552 - protein, 9 aa, synthetic construct
PLQGVLHLY

SEQ ID NO: 46553 - protein, 9 aa, synthetic construct
PLQGVLHLR

SEQ ID NO: 46554 - protein, 9 aa, synthetic construct
PLQGVLRLR

SEQ ID NO: 46555 - protein, 9 aa, synthetic construct
PLQGVLRLK

SEQ ID NO: 46556 - protein, 9 aa, synthetic construct
PLQGVLRVR

SEQ ID NO: 46557 - protein, 9 aa, synthetic construct
PLQGVLKLR

SEQ ID NO: 46558 - protein, 9 aa, synthetic construct
PLQGVLKLK

SEQ ID NO: 46559 - protein, 9 aa, synthetic construct
PLQGVARLR

SEQ ID NO: 46560 - protein, 9 aa, synthetic construct
PLQGVARLK

SEQ ID NO: 46561 - protein, 9 aa, synthetic construct
PLQGVARVH

SEQ ID NO: 46562 - protein, 9 aa, synthetic construct
PLQGVAKLR

SEQ ID NO: 46563 - protein, 9 aa, synthetic construct
PLQGVAKLK

SEQ ID NO: 46564 - protein, 9 aa, synthetic construct
PLQGVIRVR

SEQ ID NO: 46565 - protein, 9 aa, synthetic construct
PLQGVIKVR

SEQ ID NO: 46566 - protein, 9 aa, synthetic construct
PLQGVGRLH

SEQ ID NO: 46567 - protein, 9 aa, synthetic construct
PLQGVGRLK

SEQ ID NO: 46568 - protein, 9 aa, synthetic construct
PLQGVGKVR

SEQ ID NO: 46569 - protein, 9 aa, synthetic construct
PLQGVGKVK

SEQ ID NO: 46570 - protein, 9 aa, synthetic construct
PLQGGVHVH

SEQ ID NO: 46571 - protein, 9 aa, synthetic construct
PLQGGVRLR

SEQ ID NO: 46572 - protein, 9 aa, synthetic construct
PLQGGVRLK

SEQ ID NO: 46573 - protein, 9 aa, synthetic construct
PLQGGVRVK

SEQ ID NO: 46574 - protein, 9 aa, synthetic construct
PLQGGVKLK

SEQ ID NO: 46575 - protein, 9 aa, synthetic construct
PLQGGVKVR

SEQ ID NO: 46576 - protein, 9 aa, synthetic construct
PLQGGLHLY

SEQ ID NO: 46577 - protein, 9 aa, synthetic construct
PLQGGLRLY

SEQ ID NO: 46578 - protein, 9 aa, synthetic construct
PLQGGLRLR

SEQ ID NO: 46579 - protein, 9 aa, synthetic construct
PLQGGLRLK

SEQ ID NO: 46580 - protein, 9 aa, synthetic construct
PLQGGLRLF

SEQ ID NO: 46581 - protein, 9 aa, synthetic construct
PLQGGLRVY

SEQ ID NO: 46582 - protein, 9 aa, synthetic construct
PLQGGLRVR

SEQ ID NO: 46583 - protein, 9 aa, synthetic construct
PLQGGLKLR

SEQ ID NO: 46584 - protein, 9 aa, synthetic construct
PLQGGLKLK

SEQ ID NO: 46585 - protein, 9 aa, synthetic construct
PLQGGARLR

SEQ ID NO: 46586 - protein, 9 aa, synthetic construct
PLQGGARLK

SEQ ID NO: 46587 - protein, 9 aa, synthetic construct
PLQGGARVH

SEQ ID NO: 46588 - protein, 9 aa, synthetic construct
PLQGGARVK

SEQ ID NO: 46589 - protein, 9 aa, synthetic construct
PLQGGAKLR

SEQ ID NO: 46590 - protein, 9 aa, synthetic construct
PLQGGAKVK

SEQ ID NO: 46591 - protein, 9 aa, synthetic construct
PLQGGIRLR

SEQ ID NO: 46592 - protein, 9 aa, synthetic construct
PLQGGIKLK

SEQ ID NO: 46593 - protein, 9 aa, synthetic construct
PLQGGIKVK

SEQ ID NO: 46594 - protein, 9 aa, synthetic construct
PLQGGGHLR

SEQ ID NO: 46595 - protein, 9 aa, synthetic construct
PLQGGGRLR

SEQ ID NO: 46596 - protein, 9 aa, synthetic construct
PLQGGGKLK

SEQ ID NO: 46597 - protein, 9 aa, synthetic construct
PLQGGGKVK

SEQ ID NO: 46598 - protein, 9 aa, synthetic construct
PLQAAVRLR

SEQ ID NO: 46599 - protein, 9 aa, synthetic construct
PLQAAVRVK

SEQ ID NO: 46600 - protein, 9 aa, synthetic construct
PLQAALRLR

SEQ ID NO: 46601 - protein, 9 aa, synthetic construct
PLQAALRLK

SEQ ID NO: 46602 - protein, 9 aa, synthetic construct
PLQAALRVR

SEQ ID NO: 46603 - protein, 9 aa, synthetic construct
PLQAALRVK

SEQ ID NO: 46604 - protein, 9 aa, synthetic construct
PLQAAARLR

SEQ ID NO: 46605 - protein, 9 aa, synthetic construct
PLQAAGRLR

SEQ ID NO: 46606 - protein, 9 aa, synthetic construct
PLQAAGKLR

SEQ ID NO: 46607 - protein, 9 aa, synthetic construct
PLQATVRLR

SEQ ID NO: 46608 - protein, 9 aa, synthetic construct
PLQATVRVR

SEQ ID NO: 46609 - protein, 9 aa, synthetic construct
PLQATVRVK

SEQ ID NO: 46610 - protein, 9 aa, synthetic construct
PLQATVKVR

SEQ ID NO: 46611 - protein, 9 aa, synthetic construct
PLQATVKVK

SEQ ID NO: 46612 - protein, 9 aa, synthetic construct
PLQATLRLY

SEQ ID NO: 46613 - protein, 9 aa, synthetic construct
PLQATLRLK

SEQ ID NO: 46614 - protein, 9 aa, synthetic construct
PLQATLRVY

SEQ ID NO: 46615 - protein, 9 aa, synthetic construct
PLQATLRVR

SEQ ID NO: 46616 - protein, 9 aa, synthetic construct
PLQATLRVK

SEQ ID NO: 46617 - protein, 9 aa, synthetic construct
PLQATLKVY

SEQ ID NO: 46618 - protein, 9 aa, synthetic construct
PLQATIRVR

SEQ ID NO: 46619 - protein, 9 aa, synthetic construct
PLQATIKVK

SEQ ID NO: 46620 - protein, 9 aa, synthetic construct
PLQATGRLR

SEQ ID NO: 46621 - protein, 9 aa, synthetic construct
PLQATGRVR

SEQ ID NO: 46622 - protein, 9 aa, synthetic construct
PLQATGKVR

SEQ ID NO: 46623 - protein, 9 aa, synthetic construct
PLQATGKVK

SEQ ID NO: 46624 - protein, 9 aa, synthetic construct
PLQASVHVH

SEQ ID NO: 46625 - protein, 9 aa, synthetic construct
PLQASVRLR

SEQ ID NO: 46626 - protein, 9 aa, synthetic construct
PLQASVRLH

SEQ ID NO: 46627 - protein, 9 aa, synthetic construct
PLQASVRLK

SEQ ID NO: 46628 - protein, 9 aa, synthetic construct
PLQASVKLK

SEQ ID NO: 46629 - protein, 9 aa, synthetic construct
PLQASVKVR

SEQ ID NO: 46630 - protein, 9 aa, synthetic construct
PLQASLHLY

SEQ ID NO: 46631 - protein, 9 aa, synthetic construct
PLQASLHVK

SEQ ID NO: 46632 - protein, 9 aa, synthetic construct
PLQASLHVF

SEQ ID NO: 46633 - protein, 9 aa, synthetic construct
PLQASLRLY

SEQ ID NO: 46634 - protein, 9 aa, synthetic construct
PLQASLRLR

SEQ ID NO: 46635 - protein, 9 aa, synthetic construct
PLQASLRLH

SEQ ID NO: 46636 - protein, 9 aa, synthetic construct
PLQASLRLK

SEQ ID NO: 46637 - protein, 9 aa, synthetic construct
PLQASLRLF

SEQ ID NO: 46638 - protein, 9 aa, synthetic construct
PLQASLRVY

SEQ ID NO: 46639 - protein, 9 aa, synthetic construct
PLQASLRVR

SEQ ID NO: 46640 - protein, 9 aa, synthetic construct
PLQASLRVH

SEQ ID NO: 46641 - protein, 9 aa, synthetic construct
PLQASLRVK

SEQ ID NO: 46642 - protein, 9 aa, synthetic construct
PLQASLRVF

SEQ ID NO: 46643 - protein, 9 aa, synthetic construct
PLQASLKLR

SEQ ID NO: 46644 - protein, 9 aa, synthetic construct
PLQASLKLK

SEQ ID NO: 46645 - protein, 9 aa, synthetic construct
PLQASLKVR

SEQ ID NO: 46646 - protein, 9 aa, synthetic construct
PLQASLKVF

SEQ ID NO: 46647 - protein, 9 aa, synthetic construct
PLQASARLH

SEQ ID NO: 46648 - protein, 9 aa, synthetic construct
PLQASARLK

SEQ ID NO: 46649 - protein, 9 aa, synthetic construct
PLQASARVR

SEQ ID NO: 46650 - protein, 9 aa, synthetic construct
PLQASARVK

SEQ ID NO: 46651 - protein, 9 aa, synthetic construct
PLQASAKVR

SEQ ID NO: 46652 - protein, 9 aa, synthetic construct
PLQASAKVK

SEQ ID NO: 46653 - protein, 9 aa, synthetic construct
PLQASIRLK

SEQ ID NO: 46654 - protein, 9 aa, synthetic construct
PLQASIRVR

SEQ ID NO: 46655 - protein, 9 aa, synthetic construct
PLQASIRVF

SEQ ID NO: 46656 - protein, 9 aa, synthetic construct
PLQASGRLK

SEQ ID NO: 46657 - protein, 9 aa, synthetic construct
PLQASGKLK

SEQ ID NO: 46658 - protein, 9 aa, synthetic construct
PLQASGKVR

SEQ ID NO: 46659 - protein, 9 aa, synthetic construct
PLQAVVHLR

SEQ ID NO: 46660 - protein, 9 aa, synthetic construct
PLQAVVRLR

SEQ ID NO: 46661 - protein, 9 aa, synthetic construct
PLQAVVRVY

SEQ ID NO: 46662 - protein, 9 aa, synthetic construct
PLQAVVRVK

SEQ ID NO: 46663 - protein, 9 aa, synthetic construct
PLQAVVKVR

SEQ ID NO: 46664 - protein, 9 aa, synthetic construct
PLQAVLHLY

SEQ ID NO: 46665 - protein, 9 aa, synthetic construct
PLQAVLHLR

SEQ ID NO: 46666 - protein, 9 aa, synthetic construct
PLQAVLHLH

SEQ ID NO: 46667 - protein, 9 aa, synthetic construct
PLQAVLHLK

SEQ ID NO: 46668 - protein, 9 aa, synthetic construct
PLQAVLHLF

SEQ ID NO: 46669 - protein, 9 aa, synthetic construct
PLQAVLHVY

SEQ ID NO: 46670 - protein, 9 aa, synthetic construct
PLQAVLHVR

SEQ ID NO: 46671 - protein, 9 aa, synthetic construct
PLQAVLRLY

SEQ ID NO: 46672 - protein, 9 aa, synthetic construct
PLQAVLRLR

SEQ ID NO: 46673 - protein, 9 aa, synthetic construct
PLQAVLRLH

SEQ ID NO: 46674 - protein, 9 aa, synthetic construct
PLQAVLRLK

SEQ ID NO: 46675 - protein, 9 aa, synthetic construct
PLQAVLRLF

SEQ ID NO: 46676 - protein, 9 aa, synthetic construct
PLQAVLRVY

SEQ ID NO: 46677 - protein, 9 aa, synthetic construct
PLQAVLRVH

SEQ ID NO: 46678 - protein, 9 aa, synthetic construct
PLQAVLRVK

SEQ ID NO: 46679 - protein, 9 aa, synthetic construct
PLQAVLRVF

SEQ ID NO: 46680 - protein, 9 aa, synthetic construct
PLQAVLKLR

SEQ ID NO: 46681 - protein, 9 aa, synthetic construct
PLQAVLKLK

SEQ ID NO: 46682 - protein, 9 aa, synthetic construct
PLQAVAHVY

SEQ ID NO: 46683 - protein, 9 aa, synthetic construct
PLQAVARLR

SEQ ID NO: 46684 - protein, 9 aa, synthetic construct
PLQAVARLK

SEQ ID NO: 46685 - protein, 9 aa, synthetic construct
PLQAVARLF

SEQ ID NO: 46686 - protein, 9 aa, synthetic construct
PLQAVARVR

SEQ ID NO: 46687 - protein, 9 aa, synthetic construct
PLQAVARVK

SEQ ID NO: 46688 - protein, 9 aa, synthetic construct
PLQAVARVF

SEQ ID NO: 46689 - protein, 9 aa, synthetic construct
PLQAVAKLR

SEQ ID NO: 46690 - protein, 9 aa, synthetic construct
PLQAVAKLK

SEQ ID NO: 46691 - protein, 9 aa, synthetic construct
PLQAVAKVK

SEQ ID NO: 46692 - protein, 9 aa, synthetic construct
PLQAVIRLR

SEQ ID NO: 46693 - protein, 9 aa, synthetic construct
PLQAVIKLR

SEQ ID NO: 46694 - protein, 9 aa, synthetic construct
PLQAVGHLF

SEQ ID NO: 46695 - protein, 9 aa, synthetic construct
PLQAVGRLK

SEQ ID NO: 46696 - protein, 9 aa, synthetic construct
PLQAVGRVR

SEQ ID NO: 46697 - protein, 9 aa, synthetic construct
PLQAVGKLR

SEQ ID NO: 46698 - protein, 9 aa, synthetic construct
PLQAGVHLH

SEQ ID NO: 46699 - protein, 9 aa, synthetic construct
PLQAGVHVH

SEQ ID NO: 46700 - protein, 9 aa, synthetic construct
PLQAGVRLK

SEQ ID NO: 46701 - protein, 9 aa, synthetic construct
PLQAGLHLY

SEQ ID NO: 46702 - protein, 9 aa, synthetic construct
PLQAGLHLR

SEQ ID NO: 46703 - protein, 9 aa, synthetic construct
PLQAGLHLH

SEQ ID NO: 46704 - protein, 9 aa, synthetic construct
PLQAGLHLK

SEQ ID NO: 46705 - protein, 9 aa, synthetic construct
PLQAGLHLF

SEQ ID NO: 46706 - protein, 9 aa, synthetic construct
PLQAGLHVK

SEQ ID NO: 46707 - protein, 9 aa, synthetic construct
PLQAGLRLY

SEQ ID NO: 46708 - protein, 9 aa, synthetic construct
PLQAGLRLR

SEQ ID NO: 46709 - protein, 9 aa, synthetic construct
PLQAGLRLH

SEQ ID NO: 46710 - protein, 9 aa, synthetic construct
PLQAGLRLK

SEQ ID NO: 46711 - protein, 9 aa, synthetic construct
PLQAGLRLF

SEQ ID NO: 46712 - protein, 9 aa, synthetic construct
PLQAGLRVY

SEQ ID NO: 46713 - protein, 9 aa, synthetic construct
PLQAGLRVR

SEQ ID NO: 46714 - protein, 9 aa, synthetic construct
PLQAGLRVH

SEQ ID NO: 46715 - protein, 9 aa, synthetic construct
PLQAGLRVK

SEQ ID NO: 46716 - protein, 9 aa, synthetic construct
PLQAGLRVF

SEQ ID NO: 46717 - protein, 9 aa, synthetic construct
PLQAGLKLR

SEQ ID NO: 46718 - protein, 9 aa, synthetic construct
PLQAGLKLK

SEQ ID NO: 46719 - protein, 9 aa, synthetic construct
PLQAGLKVR

SEQ ID NO: 46720 - protein, 9 aa, synthetic construct
PLQAGLKVK

SEQ ID NO: 46721 - protein, 9 aa, synthetic construct
PLQAGARLR

SEQ ID NO: 46722 - protein, 9 aa, synthetic construct
PLQAGARLH

SEQ ID NO: 46723 - protein, 9 aa, synthetic construct
PLQAGARVK

SEQ ID NO: 46724 - protein, 9 aa, synthetic construct
PLQAGAKLR

SEQ ID NO: 46725 - protein, 9 aa, synthetic construct
PLQAGAKLK

SEQ ID NO: 46726 - protein, 9 aa, synthetic construct
PLQAGAKVK

SEQ ID NO: 46727 - protein, 9 aa, synthetic construct
PLQAGIRLR

SEQ ID NO: 46728 - protein, 9 aa, synthetic construct
PLQAGIRLK

SEQ ID NO: 46729 - protein, 9 aa, synthetic construct
PLQAGIRVR

SEQ ID NO: 46730 - protein, 9 aa, synthetic construct
PLQAGIRVK

SEQ ID NO: 46731 - protein, 9 aa, synthetic construct
PLQAGIKVK

SEQ ID NO: 46732 - protein, 9 aa, synthetic construct
PLQAGGKVR

SEQ ID NO: 46733 - protein, 9 aa, synthetic construct
PLPGAVRLR

SEQ ID NO: 46734 - protein, 9 aa, synthetic construct
PLPGAVRVR

SEQ ID NO: 46735 - protein, 9 aa, synthetic construct
PLPGAVRVK

SEQ ID NO: 46736 - protein, 9 aa, synthetic construct
PLPGAVKLR

SEQ ID NO: 46737 - protein, 9 aa, synthetic construct
PLPGAVKLK

SEQ ID NO: 46738 - protein, 9 aa, synthetic construct
PLPGAVKVR

SEQ ID NO: 46739 - protein, 9 aa, synthetic construct
PLPGALHLY

SEQ ID NO: 46740 - protein, 9 aa, synthetic construct
PLPGALHLR

SEQ ID NO: 46741 - protein, 9 aa, synthetic construct
PLPGALHVF

SEQ ID NO: 46742 - protein, 9 aa, synthetic construct
PLPGALRLR

SEQ ID NO: 46743 - protein, 9 aa, synthetic construct
PLPGALRLK

SEQ ID NO: 46744 - protein, 9 aa, synthetic construct
PLPGALRVY

SEQ ID NO: 46745 - protein, 9 aa, synthetic construct
PLPGALRVR

SEQ ID NO: 46746 - protein, 9 aa, synthetic construct
PLPGALKLY

SEQ ID NO: 46747 - protein, 9 aa, synthetic construct
PLPGALKLK

SEQ ID NO: 46748 - protein, 9 aa, synthetic construct
PLPGAARLR

SEQ ID NO: 46749 - protein, 9 aa, synthetic construct
PLPGAARVK

SEQ ID NO: 46750 - protein, 9 aa, synthetic construct
PLPGAIRLR

SEQ ID NO: 46751 - protein, 9 aa, synthetic construct
PLPGAIRVK

SEQ ID NO: 46752 - protein, 9 aa, synthetic construct
PLPGAIKVK

SEQ ID NO: 46753 - protein, 9 aa, synthetic construct
PLPGAGRLK

SEQ ID NO: 46754 - protein, 9 aa, synthetic construct
PLPGTLHLF

SEQ ID NO: 46755 - protein, 9 aa, synthetic construct
PLPGTLRLR

SEQ ID NO: 46756 - protein, 9 aa, synthetic construct
PLPGTLRVR

SEQ ID NO: 46757 - protein, 9 aa, synthetic construct
PLPGTLRVH

SEQ ID NO: 46758 - protein, 9 aa, synthetic construct
PLPGTLRVK

SEQ ID NO: 46759 - protein, 9 aa, synthetic construct
PLPGTLKVY

SEQ ID NO: 46760 - protein, 9 aa, synthetic construct
PLPGTARVR

SEQ ID NO: 46761 - protein, 9 aa, synthetic construct
PLPGTARVK

SEQ ID NO: 46762 - protein, 9 aa, synthetic construct
PLPGTIRVR

SEQ ID NO: 46763 - protein, 9 aa, synthetic construct
PLPGSVHVH

SEQ ID NO: 46764 - protein, 9 aa, synthetic construct
PLPGSVRVR

SEQ ID NO: 46765 - protein, 9 aa, synthetic construct
PLPGSVRVK

SEQ ID NO: 46766 - protein, 9 aa, synthetic construct
PLPGSVKLK

SEQ ID NO: 46767 - protein, 9 aa, synthetic construct
PLPGSLHLF

SEQ ID NO: 46768 - protein, 9 aa, synthetic construct
PLPGSLRLY

SEQ ID NO: 46769 - protein, 9 aa, synthetic construct
PLPGSLRLR

SEQ ID NO: 46770 - protein, 9 aa, synthetic construct
PLPGSLRLH

SEQ ID NO: 46771 - protein, 9 aa, synthetic construct
PLPGSLRLK

SEQ ID NO: 46772 - protein, 9 aa, synthetic construct
PLPGSLRLF

SEQ ID NO: 46773 - protein, 9 aa, synthetic construct
PLPGSLRVR

SEQ ID NO: 46774 - protein, 9 aa, synthetic construct
PLPGSLRVK

SEQ ID NO: 46775 - protein, 9 aa, synthetic construct
PLPGSLKLK

SEQ ID NO: 46776 - protein, 9 aa, synthetic construct
PLPGSLKVR

SEQ ID NO: 46777 - protein, 9 aa, synthetic construct
PLPGSARLK

SEQ ID NO: 46778 - protein, 9 aa, synthetic construct
PLPGSARVR

SEQ ID NO: 46779 - protein, 9 aa, synthetic construct
PLPGSARVK

SEQ ID NO: 46780 - protein, 9 aa, synthetic construct
PLPGSAKLR

SEQ ID NO: 46781 - protein, 9 aa, synthetic construct
PLPGSAKLK

SEQ ID NO: 46782 - protein, 9 aa, synthetic construct
PLPGSAKVR

SEQ ID NO: 46783 - protein, 9 aa, synthetic construct
PLPGSAKVK

SEQ ID NO: 46784 - protein, 9 aa, synthetic construct
PLPGSIRLR

SEQ ID NO: 46785 - protein, 9 aa, synthetic construct
PLPGSIRLK

SEQ ID NO: 46786 - protein, 9 aa, synthetic construct
PLPGSIKLR

SEQ ID NO: 46787 - protein, 9 aa, synthetic construct
PLPGSIKVK

SEQ ID NO: 46788 - protein, 9 aa, synthetic construct
PLPGSGRLR

SEQ ID NO: 46789 - protein, 9 aa, synthetic construct
PLPGSGRVR

SEQ ID NO: 46790 - protein, 9 aa, synthetic construct
PLPGSGRVK

SEQ ID NO: 46791 - protein, 9 aa, synthetic construct
PLPGSGKLK

SEQ ID NO: 46792 - protein, 9 aa, synthetic construct
PLPGVVRLR

SEQ ID NO: 46793 - protein, 9 aa, synthetic construct
PLPGVVRLK

SEQ ID NO: 46794 - protein, 9 aa, synthetic construct
PLPGVVRVR

SEQ ID NO: 46795 - protein, 9 aa, synthetic construct
PLPGVVRVK

SEQ ID NO: 46796 - protein, 9 aa, synthetic construct
PLPGVVKLR

SEQ ID NO: 46797 - protein, 9 aa, synthetic construct
PLPGVLHLY

SEQ ID NO: 46798 - protein, 9 aa, synthetic construct
PLPGVLHLR

SEQ ID NO: 46799 - protein, 9 aa, synthetic construct
PLPGVLHLF

SEQ ID NO: 46800 - protein, 9 aa, synthetic construct
PLPGVLRLY

SEQ ID NO: 46801 - protein, 9 aa, synthetic construct
PLPGVLRLR

SEQ ID NO: 46802 - protein, 9 aa, synthetic construct
PLPGVLRLH

SEQ ID NO: 46803 - protein, 9 aa, synthetic construct
PLPGVLRLF

SEQ ID NO: 46804 - protein, 9 aa, synthetic construct
PLPGVLRVY

SEQ ID NO: 46805 - protein, 9 aa, synthetic construct
PLPGVLRVR

SEQ ID NO: 46806 - protein, 9 aa, synthetic construct
PLPGVLRVH

SEQ ID NO: 46807 - protein, 9 aa, synthetic construct
PLPGVLRVF

SEQ ID NO: 46808 - protein, 9 aa, synthetic construct
PLPGVLKLY

SEQ ID NO: 46809 - protein, 9 aa, synthetic construct
PLPGVLKLH

SEQ ID NO: 46810 - protein, 9 aa, synthetic construct
PLPGVLKVK

SEQ ID NO: 46811 - protein, 9 aa, synthetic construct
PLPGVARLY

SEQ ID NO: 46812 - protein, 9 aa, synthetic construct
PLPGVARLK

SEQ ID NO: 46813 - protein, 9 aa, synthetic construct
PLPGVAKLK

SEQ ID NO: 46814 - protein, 9 aa, synthetic construct
PLPGVGRLR

SEQ ID NO: 46815 - protein, 9 aa, synthetic construct
PLPGVGRLK

SEQ ID NO: 46816 - protein, 9 aa, synthetic construct
PLPGGVHVH

SEQ ID NO: 46817 - protein, 9 aa, synthetic construct
PLPGGVRLR

SEQ ID NO: 46818 - protein, 9 aa, synthetic construct
PLPGGVKLK

SEQ ID NO: 46819 - protein, 9 aa, synthetic construct
PLPGGLHLK

SEQ ID NO: 46820 - protein, 9 aa, synthetic construct
PLPGGLHVY

SEQ ID NO: 46821 - protein, 9 aa, synthetic construct
PLPGGLHVF

SEQ ID NO: 46822 - protein, 9 aa, synthetic construct
PLPGGLRLR

SEQ ID NO: 46823 - protein, 9 aa, synthetic construct
PLPGGLRLH

SEQ ID NO: 46824 - protein, 9 aa, synthetic construct
PLPGGLRLK

SEQ ID NO: 46825 - protein, 9 aa, synthetic construct
PLPGGLRVY

SEQ ID NO: 46826 - protein, 9 aa, synthetic construct
PLPGGLRVR

SEQ ID NO: 46827 - protein, 9 aa, synthetic construct
PLPGGLRVH

SEQ ID NO: 46828 - protein, 9 aa, synthetic construct
PLPGGLRVK

SEQ ID NO: 46829 - protein, 9 aa, synthetic construct
PLPGGLKLR

SEQ ID NO: 46830 - protein, 9 aa, synthetic construct
PLPGGLKLK

SEQ ID NO: 46831 - protein, 9 aa, synthetic construct
PLPGGLKLF

SEQ ID NO: 46832 - protein, 9 aa, synthetic construct
PLPGGLKVK

SEQ ID NO: 46833 - protein, 9 aa, synthetic construct
PLPGGARLR

SEQ ID NO: 46834 - protein, 9 aa, synthetic construct
PLPGGARVK

SEQ ID NO: 46835 - protein, 9 aa, synthetic construct
PLPGGIRLR

SEQ ID NO: 46836 - protein, 9 aa, synthetic construct
PLPGGIRVR

SEQ ID NO: 46837 - protein, 9 aa, synthetic construct
PLPGGIRVK

SEQ ID NO: 46838 - protein, 9 aa, synthetic construct
PLPGGGRVR

SEQ ID NO: 46839 - protein, 9 aa, synthetic construct
PLPAALHLR

SEQ ID NO: 46840 - protein, 9 aa, synthetic construct
PLPAALRLY

SEQ ID NO: 46841 - protein, 9 aa, synthetic construct
PLPAALRLR

SEQ ID NO: 46842 - protein, 9 aa, synthetic construct
PLPAALRLK

SEQ ID NO: 46843 - protein, 9 aa, synthetic construct
PLPAALRLF

SEQ ID NO: 46844 - protein, 9 aa, synthetic construct
PLPAALRVY

SEQ ID NO: 46845 - protein, 9 aa, synthetic construct
PLPAALRVR

SEQ ID NO: 46846 - protein, 9 aa, synthetic construct
PLPAALKVR

SEQ ID NO: 46847 - protein, 9 aa, synthetic construct
PLPAALKVK

SEQ ID NO: 46848 - protein, 9 aa, synthetic construct
PLPAAGRLR

SEQ ID NO: 46849 - protein, 9 aa, synthetic construct
PLPATVRVR

SEQ ID NO: 46850 - protein, 9 aa, synthetic construct
PLPATVRVK

SEQ ID NO: 46851 - protein, 9 aa, synthetic construct
PLPATLRLF

SEQ ID NO: 46852 - protein, 9 aa, synthetic construct
PLPATLRVH

SEQ ID NO: 46853 - protein, 9 aa, synthetic construct
PLPATARVK

SEQ ID NO: 46854 - protein, 9 aa, synthetic construct
PLPATIRLK

SEQ ID NO: 46855 - protein, 9 aa, synthetic construct
PLPASVRLR

SEQ ID NO: 46856 - protein, 9 aa, synthetic construct
PLPASVRLH

SEQ ID NO: 46857 - protein, 9 aa, synthetic construct
PLPASVRVR

SEQ ID NO: 46858 - protein, 9 aa, synthetic construct
PLPASLRLY

SEQ ID NO: 46859 - protein, 9 aa, synthetic construct
PLPASLRLR

SEQ ID NO: 46860 - protein, 9 aa, synthetic construct
PLPASLRLH

SEQ ID NO: 46861 - protein, 9 aa, synthetic construct
PLPASLRLK

SEQ ID NO: 46862 - protein, 9 aa, synthetic construct
PLPASLRLF

SEQ ID NO: 46863 - protein, 9 aa, synthetic construct
PLPASLRVY

SEQ ID NO: 46864 - protein, 9 aa, synthetic construct
PLPASLRVR

SEQ ID NO: 46865 - protein, 9 aa, synthetic construct
PLPASLRVH

SEQ ID NO: 46866 - protein, 9 aa, synthetic construct
PLPASLRVK

SEQ ID NO: 46867 - protein, 9 aa, synthetic construct
PLPASLRVF

SEQ ID NO: 46868 - protein, 9 aa, synthetic construct
PLPASLKLR

SEQ ID NO: 46869 - protein, 9 aa, synthetic construct
PLPASLKVR

SEQ ID NO: 46870 - protein, 9 aa, synthetic construct
PLPASLKVF

SEQ ID NO: 46871 - protein, 9 aa, synthetic construct
PLPASAKVR

SEQ ID NO: 46872 - protein, 9 aa, synthetic construct
PLPASIRLR

SEQ ID NO: 46873 - protein, 9 aa, synthetic construct
PLPASIRLK

SEQ ID NO: 46874 - protein, 9 aa, synthetic construct
PLPASIKVR

SEQ ID NO: 46875 - protein, 9 aa, synthetic construct
PLPASGRLK

SEQ ID NO: 46876 - protein, 9 aa, synthetic construct
PLPASGRVK

SEQ ID NO: 46877 - protein, 9 aa, synthetic construct
PLPASGKVR

SEQ ID NO: 46878 - protein, 9 aa, synthetic construct
PLPASGKVK

SEQ ID NO: 46879 - protein, 9 aa, synthetic construct
PLPAVVHLF

SEQ ID NO: 46880 - protein, 9 aa, synthetic construct
PLPAVVRLR

SEQ ID NO: 46881 - protein, 9 aa, synthetic construct
PLPAVVRLK

SEQ ID NO: 46882 - protein, 9 aa, synthetic construct
PLPAVVKLK

SEQ ID NO: 46883 - protein, 9 aa, synthetic construct
PLPAVLHLY

SEQ ID NO: 46884 - protein, 9 aa, synthetic construct
PLPAVLHLR

SEQ ID NO: 46885 - protein, 9 aa, synthetic construct
PLPAVLHLH

SEQ ID NO: 46886 - protein, 9 aa, synthetic construct
PLPAVLHLK

SEQ ID NO: 46887 - protein, 9 aa, synthetic construct
PLPAVLHLF

SEQ ID NO: 46888 - protein, 9 aa, synthetic construct
PLPAVLHVF

SEQ ID NO: 46889 - protein, 9 aa, synthetic construct
PLPAVLRLY

SEQ ID NO: 46890 - protein, 9 aa, synthetic construct
PLPAVLRLR

SEQ ID NO: 46891 - protein, 9 aa, synthetic construct
PLPAVLRLK

SEQ ID NO: 46892 - protein, 9 aa, synthetic construct
PLPAVLRVY

SEQ ID NO: 46893 - protein, 9 aa, synthetic construct
PLPAVLRVR

SEQ ID NO: 46894 - protein, 9 aa, synthetic construct
PLPAVLRVH

SEQ ID NO: 46895 - protein, 9 aa, synthetic construct
PLPAVLRVF

SEQ ID NO: 46896 - protein, 9 aa, synthetic construct
PLPAVLKLR

SEQ ID NO: 46897 - protein, 9 aa, synthetic construct
PLPAVLKLK

SEQ ID NO: 46898 - protein, 9 aa, synthetic construct
PLPAVLKVF

SEQ ID NO: 46899 - protein, 9 aa, synthetic construct
PLPAVARLK

SEQ ID NO: 46900 - protein, 9 aa, synthetic construct
PLPAVARVY

SEQ ID NO: 46901 - protein, 9 aa, synthetic construct
PLPAVARVR

SEQ ID NO: 46902 - protein, 9 aa, synthetic construct
PLPAVARVK

SEQ ID NO: 46903 - protein, 9 aa, synthetic construct
PLPAVARVF

SEQ ID NO: 46904 - protein, 9 aa, synthetic construct
PLPAVAKLR

SEQ ID NO: 46905 - protein, 9 aa, synthetic construct
PLPAVAKLK

SEQ ID NO: 46906 - protein, 9 aa, synthetic construct
PLPAVAKVH

SEQ ID NO: 46907 - protein, 9 aa, synthetic construct
PLPAVAKVK

SEQ ID NO: 46908 - protein, 9 aa, synthetic construct
PLPAVIRVR

SEQ ID NO: 46909 - protein, 9 aa, synthetic construct
PLPAVIRVF

SEQ ID NO: 46910 - protein, 9 aa, synthetic construct
PLPAVIKLR

SEQ ID NO: 46911 - protein, 9 aa, synthetic construct
PLPAVIKVR

SEQ ID NO: 46912 - protein, 9 aa, synthetic construct
PLPAVIKVK

SEQ ID NO: 46913 - protein, 9 aa, synthetic construct
PLPAVGRVH

SEQ ID NO: 46914 - protein, 9 aa, synthetic construct
PLPAVGRVK

SEQ ID NO: 46915 - protein, 9 aa, synthetic construct
PLPAGVHVH

SEQ ID NO: 46916 - protein, 9 aa, synthetic construct
PLPAGVRLK

SEQ ID NO: 46917 - protein, 9 aa, synthetic construct
PLPAGVRVR

SEQ ID NO: 46918 - protein, 9 aa, synthetic construct
PLPAGLHLY

SEQ ID NO: 46919 - protein, 9 aa, synthetic construct
PLPAGLHLR

SEQ ID NO: 46920 - protein, 9 aa, synthetic construct
PLPAGLHLH

SEQ ID NO: 46921 - protein, 9 aa, synthetic construct
PLPAGLHLK

SEQ ID NO: 46922 - protein, 9 aa, synthetic construct
PLPAGLHLF

SEQ ID NO: 46923 - protein, 9 aa, synthetic construct
PLPAGLHVR

SEQ ID NO: 46924 - protein, 9 aa, synthetic construct
PLPAGLHVH

SEQ ID NO: 46925 - protein, 9 aa, synthetic construct
PLPAGLHVK

SEQ ID NO: 46926 - protein, 9 aa, synthetic construct
PLPAGLHVF

SEQ ID NO: 46927 - protein, 9 aa, synthetic construct
PLPAGLRLY

SEQ ID NO: 46928 - protein, 9 aa, synthetic construct
PLPAGLRLR

SEQ ID NO: 46929 - protein, 9 aa, synthetic construct
PLPAGLRLH

SEQ ID NO: 46930 - protein, 9 aa, synthetic construct
PLPAGLRLK

SEQ ID NO: 46931 - protein, 9 aa, synthetic construct
PLPAGLRLF

SEQ ID NO: 46932 - protein, 9 aa, synthetic construct
PLPAGLRVY

SEQ ID NO: 46933 - protein, 9 aa, synthetic construct
PLPAGLRVR

SEQ ID NO: 46934 - protein, 9 aa, synthetic construct
PLPAGLRVH

SEQ ID NO: 46935 - protein, 9 aa, synthetic construct
PLPAGLRVK

SEQ ID NO: 46936 - protein, 9 aa, synthetic construct
PLPAGLRVF

SEQ ID NO: 46937 - protein, 9 aa, synthetic construct
PLPAGLKLR

SEQ ID NO: 46938 - protein, 9 aa, synthetic construct
PLPAGLKLK

SEQ ID NO: 46939 - protein, 9 aa, synthetic construct
PLPAGLKLF

SEQ ID NO: 46940 - protein, 9 aa, synthetic construct
PLPAGAKLK

SEQ ID NO: 46941 - protein, 9 aa, synthetic construct
PLPAGIRLR

SEQ ID NO: 46942 - protein, 9 aa, synthetic construct
PLPAGIKLK

SEQ ID NO: 46943 - protein, 9 aa, synthetic construct
PLPAGGRLR

SEQ ID NO: 46944 - protein, 9 aa, synthetic construct
PLPAGGRLK

SEQ ID NO: 46945 - protein, 9 aa, synthetic construct
PLPAGGRVR

SEQ ID NO: 46946 - protein, 9 aa, synthetic construct
PTNGAVRLK

SEQ ID NO: 46947 - protein, 9 aa, synthetic construct
PTNGAVRVR

SEQ ID NO: 46948 - protein, 9 aa, synthetic construct
PTNGAVRVK

SEQ ID NO: 46949 - protein, 9 aa, synthetic construct
PTNGALRLR

SEQ ID NO: 46950 - protein, 9 aa, synthetic construct
PTNGAIRVR

SEQ ID NO: 46951 - protein, 9 aa, synthetic construct
PTNGAIRVK

SEQ ID NO: 46952 - protein, 9 aa, synthetic construct
PTNGAIKVK

SEQ ID NO: 46953 - protein, 9 aa, synthetic construct
PTNGTVRLK

SEQ ID NO: 46954 - protein, 9 aa, synthetic construct
PTNGTVKLK

SEQ ID NO: 46955 - protein, 9 aa, synthetic construct
PTNGTLKVR

SEQ ID NO: 46956 - protein, 9 aa, synthetic construct
PTNGTIRLK

SEQ ID NO: 46957 - protein, 9 aa, synthetic construct
PTNGSVRLR

SEQ ID NO: 46958 - protein, 9 aa, synthetic construct
PTNGSVRLK

SEQ ID NO: 46959 - protein, 9 aa, synthetic construct
PTNGSLRLR

SEQ ID NO: 46960 - protein, 9 aa, synthetic construct
PTNGSLRLK

SEQ ID NO: 46961 - protein, 9 aa, synthetic construct
PTNGSLRLF

SEQ ID NO: 46962 - protein, 9 aa, synthetic construct
PTNGSLRVY

SEQ ID NO: 46963 - protein, 9 aa, synthetic construct
PTNGSLKLK

SEQ ID NO: 46964 - protein, 9 aa, synthetic construct
PTNGSARLR

SEQ ID NO: 46965 - protein, 9 aa, synthetic construct
PTNGSARVR

SEQ ID NO: 46966 - protein, 9 aa, synthetic construct
PTNGSAKVK

SEQ ID NO: 46967 - protein, 9 aa, synthetic construct
PTNGSIKVR

SEQ ID NO: 46968 - protein, 9 aa, synthetic construct
PTNGSGRVR

SEQ ID NO: 46969 - protein, 9 aa, synthetic construct
PTNGSGKVR

SEQ ID NO: 46970 - protein, 9 aa, synthetic construct
PTNGVVRLR

SEQ ID NO: 46971 - protein, 9 aa, synthetic construct
PTNGVVKLR

SEQ ID NO: 46972 - protein, 9 aa, synthetic construct
PTNGVVKVR

SEQ ID NO: 46973 - protein, 9 aa, synthetic construct
PTNGVLRVR

SEQ ID NO: 46974 - protein, 9 aa, synthetic construct
PTNGVARLK

SEQ ID NO: 46975 - protein, 9 aa, synthetic construct
PTNGVIRLK

SEQ ID NO: 46976 - protein, 9 aa, synthetic construct
PTNGVIRVR

SEQ ID NO: 46977 - protein, 9 aa, synthetic construct
PTNGVGRLR

SEQ ID NO: 46978 - protein, 9 aa, synthetic construct
PTNGVGRLK

SEQ ID NO: 46979 - protein, 9 aa, synthetic construct
PTNGGVHVH

SEQ ID NO: 46980 - protein, 9 aa, synthetic construct
PTNGGVRLR

SEQ ID NO: 46981 - protein, 9 aa, synthetic construct
PTNGGVRVR

SEQ ID NO: 46982 - protein, 9 aa, synthetic construct
PTNGGLHLY

SEQ ID NO: 46983 - protein, 9 aa, synthetic construct
PTNGGLRLR

SEQ ID NO: 46984 - protein, 9 aa, synthetic construct
PTNGGLRLH

SEQ ID NO: 46985 - protein, 9 aa, synthetic construct
PTNGGLRLK

SEQ ID NO: 46986 - protein, 9 aa, synthetic construct
PTNGGLRVR

SEQ ID NO: 46987 - protein, 9 aa, synthetic construct
PTNGGLRVK

SEQ ID NO: 46988 - protein, 9 aa, synthetic construct
PTNGGLKLR

SEQ ID NO: 46989 - protein, 9 aa, synthetic construct
PTNGGLKLK

SEQ ID NO: 46990 - protein, 9 aa, synthetic construct
PTNGGLKVR

SEQ ID NO: 46991 - protein, 9 aa, synthetic construct
PTNGGARLR

SEQ ID NO: 46992 - protein, 9 aa, synthetic construct
PTNGGARLK

SEQ ID NO: 46993 - protein, 9 aa, synthetic construct
PTNGGAKLK

SEQ ID NO: 46994 - protein, 9 aa, synthetic construct
PTNAAVRLR

SEQ ID NO: 46995 - protein, 9 aa, synthetic construct
PTNAAAKLR

SEQ ID NO: 46996 - protein, 9 aa, synthetic construct
PTNATVRVR

SEQ ID NO: 46997 - protein, 9 aa, synthetic construct
PTNATLRLY

SEQ ID NO: 46998 - protein, 9 aa, synthetic construct
PTNATLRLK

SEQ ID NO: 46999 - protein, 9 aa, synthetic construct
PTNATLRVK

SEQ ID NO: 47000 - protein, 9 aa, synthetic construct
PTNATLKVR

SEQ ID NO: 47001 - protein, 9 aa, synthetic construct
PTNATARLR

SEQ ID NO: 47002 - protein, 9 aa, synthetic construct
PTNATIRLK

SEQ ID NO: 47003 - protein, 9 aa, synthetic construct
PTNASVRLR

SEQ ID NO: 47004 - protein, 9 aa, synthetic construct
PTNASVRVR

SEQ ID NO: 47005 - protein, 9 aa, synthetic construct
PTNASVKVR

SEQ ID NO: 47006 - protein, 9 aa, synthetic construct
PTNASLHLF

SEQ ID NO: 47007 - protein, 9 aa, synthetic construct
PTNASLHVY

SEQ ID NO: 47008 - protein, 9 aa, synthetic construct
PTNASLRLR

SEQ ID NO: 47009 - protein, 9 aa, synthetic construct
PTNASLRLK

SEQ ID NO: 47010 - protein, 9 aa, synthetic construct
PTNASLKLR

SEQ ID NO: 47011 - protein, 9 aa, synthetic construct
PTNASLKLK

SEQ ID NO: 47012 - protein, 9 aa, synthetic construct
PTNASLKVR

SEQ ID NO: 47013 - protein, 9 aa, synthetic construct
PTNASARVR

SEQ ID NO: 47014 - protein, 9 aa, synthetic construct
PTNASARVK

SEQ ID NO: 47015 - protein, 9 aa, synthetic construct
PTNASAKLK

SEQ ID NO: 47016 - protein, 9 aa, synthetic construct
PTNASIRVY

SEQ ID NO: 47017 - protein, 9 aa, synthetic construct
PTNASIRVR

SEQ ID NO: 47018 - protein, 9 aa, synthetic construct
PTNASGRVR

SEQ ID NO: 47019 - protein, 9 aa, synthetic construct
PTNASGRVK

SEQ ID NO: 47020 - protein, 9 aa, synthetic construct
PTNAVVHLF

SEQ ID NO: 47021 - protein, 9 aa, synthetic construct
PTNAVVRLR

SEQ ID NO: 47022 - protein, 9 aa, synthetic construct
PTNAVVRVK

SEQ ID NO: 47023 - protein, 9 aa, synthetic construct
PTNAVLHLY

SEQ ID NO: 47024 - protein, 9 aa, synthetic construct
PTNAVLHLR

SEQ ID NO: 47025 - protein, 9 aa, synthetic construct
PTNAVLHLK

SEQ ID NO: 47026 - protein, 9 aa, synthetic construct
PTNAVLHLF

SEQ ID NO: 47027 - protein, 9 aa, synthetic construct
PTNAVLRLR

SEQ ID NO: 47028 - protein, 9 aa, synthetic construct
PTNAVLRVY

SEQ ID NO: 47029 - protein, 9 aa, synthetic construct
PTNAVLRVR

SEQ ID NO: 47030 - protein, 9 aa, synthetic construct
PTNAVLRVK

SEQ ID NO: 47031 - protein, 9 aa, synthetic construct
PTNAVLKLK

SEQ ID NO: 47032 - protein, 9 aa, synthetic construct
PTNAVARLR

SEQ ID NO: 47033 - protein, 9 aa, synthetic construct
PTNAVARLH

SEQ ID NO: 47034 - protein, 9 aa, synthetic construct
PTNAVARLK

SEQ ID NO: 47035 - protein, 9 aa, synthetic construct
PTNAVAKLR

SEQ ID NO: 47036 - protein, 9 aa, synthetic construct
PTNAVIKVR

SEQ ID NO: 47037 - protein, 9 aa, synthetic construct
PTNAVGKLR

SEQ ID NO: 47038 - protein, 9 aa, synthetic construct
PTNAVGKLK

SEQ ID NO: 47039 - protein, 9 aa, synthetic construct
PTNAVGKVK

SEQ ID NO: 47040 - protein, 9 aa, synthetic construct
PTNAGVHLH

SEQ ID NO: 47041 - protein, 9 aa, synthetic construct
PTNAGVHLK

SEQ ID NO: 47042 - protein, 9 aa, synthetic construct
PTNAGVHVH

SEQ ID NO: 47043 - protein, 9 aa, synthetic construct
PTNAGVRLR

SEQ ID NO: 47044 - protein, 9 aa, synthetic construct
PTNAGVRVR

SEQ ID NO: 47045 - protein, 9 aa, synthetic construct
PTNAGLHLY

SEQ ID NO: 47046 - protein, 9 aa, synthetic construct
PTNAGLHLR

SEQ ID NO: 47047 - protein, 9 aa, synthetic construct
PTNAGLHLH

SEQ ID NO: 47048 - protein, 9 aa, synthetic construct
PTNAGLHVY

SEQ ID NO: 47049 - protein, 9 aa, synthetic construct
PTNAGLHVR

SEQ ID NO: 47050 - protein, 9 aa, synthetic construct
PTNAGLHVH

SEQ ID NO: 47051 - protein, 9 aa, synthetic construct
PTNAGLHVF

SEQ ID NO: 47052 - protein, 9 aa, synthetic construct
PTNAGLRLY

SEQ ID NO: 47053 - protein, 9 aa, synthetic construct
PTNAGLRLR

SEQ ID NO: 47054 - protein, 9 aa, synthetic construct
PTNAGLRLK

SEQ ID NO: 47055 - protein, 9 aa, synthetic construct
PTNAGLRLF

SEQ ID NO: 47056 - protein, 9 aa, synthetic construct
PTNAGLRVR

SEQ ID NO: 47057 - protein, 9 aa, synthetic construct
PTNAGLRVK

SEQ ID NO: 47058 - protein, 9 aa, synthetic construct
PTNAGLKLR

SEQ ID NO: 47059 - protein, 9 aa, synthetic construct
PTNAGLKLK

SEQ ID NO: 47060 - protein, 9 aa, synthetic construct
PTNAGLKVR

SEQ ID NO: 47061 - protein, 9 aa, synthetic construct
PTNAGARLR

SEQ ID NO: 47062 - protein, 9 aa, synthetic construct
PTNAGIRLK

SEQ ID NO: 47063 - protein, 9 aa, synthetic construct
PTNAGIRVK

SEQ ID NO: 47064 - protein, 9 aa, synthetic construct
PTNAGIKLR

SEQ ID NO: 47065 - protein, 9 aa, synthetic construct
PTQGAVRLR

SEQ ID NO: 47066 - protein, 9 aa, synthetic construct
PTQGAVRVK

SEQ ID NO: 47067 - protein, 9 aa, synthetic construct
PTQGALRLR

SEQ ID NO: 47068 - protein, 9 aa, synthetic construct
PTQGALKVR

SEQ ID NO: 47069 - protein, 9 aa, synthetic construct
PTQGALKVK

SEQ ID NO: 47070 - protein, 9 aa, synthetic construct
PTQGAARLK

SEQ ID NO: 47071 - protein, 9 aa, synthetic construct
PTQGAARVK

SEQ ID NO: 47072 - protein, 9 aa, synthetic construct
PTQGAIRLK

SEQ ID NO: 47073 - protein, 9 aa, synthetic construct
PTQGTVRVR

SEQ ID NO: 47074 - protein, 9 aa, synthetic construct
PTQGTVRVK

SEQ ID NO: 47075 - protein, 9 aa, synthetic construct
PTQGTLRVR

SEQ ID NO: 47076 - protein, 9 aa, synthetic construct
PTQGTLRVK

SEQ ID NO: 47077 - protein, 9 aa, synthetic construct
PTQGTLKLR

SEQ ID NO: 47078 - protein, 9 aa, synthetic construct
PTQGTLKLK

SEQ ID NO: 47079 - protein, 9 aa, synthetic construct
PTQGTLKVR

SEQ ID NO: 47080 - protein, 9 aa, synthetic construct
PTQGTLKVK

SEQ ID NO: 47081 - protein, 9 aa, synthetic construct
PTQGTARLR

SEQ ID NO: 47082 - protein, 9 aa, synthetic construct
PTQGTARVK

SEQ ID NO: 47083 - protein, 9 aa, synthetic construct
PTQGTIRVR

SEQ ID NO: 47084 - protein, 9 aa, synthetic construct
PTQGTGKLR

SEQ ID NO: 47085 - protein, 9 aa, synthetic construct
PTQGSVHVH

SEQ ID NO: 47086 - protein, 9 aa, synthetic construct
PTQGSVRLK

SEQ ID NO: 47087 - protein, 9 aa, synthetic construct
PTQGSVRVR

SEQ ID NO: 47088 - protein, 9 aa, synthetic construct
PTQGSLRLY

SEQ ID NO: 47089 - protein, 9 aa, synthetic construct
PTQGSLRLR

SEQ ID NO: 47090 - protein, 9 aa, synthetic construct
PTQGSLRLK

SEQ ID NO: 47091 - protein, 9 aa, synthetic construct
PTQGSLRLF

SEQ ID NO: 47092 - protein, 9 aa, synthetic construct
PTQGSLRVR

SEQ ID NO: 47093 - protein, 9 aa, synthetic construct
PTQGSLRVK

SEQ ID NO: 47094 - protein, 9 aa, synthetic construct
PTQGSLKLR

SEQ ID NO: 47095 - protein, 9 aa, synthetic construct
PTQGSLKLK

SEQ ID NO: 47096 - protein, 9 aa, synthetic construct
PTQGSLKVR

SEQ ID NO: 47097 - protein, 9 aa, synthetic construct
PTQGSLKVK

SEQ ID NO: 47098 - protein, 9 aa, synthetic construct
PTQGSARVR

SEQ ID NO: 47099 - protein, 9 aa, synthetic construct
PTQGSARVK

SEQ ID NO: 47100 - protein, 9 aa, synthetic construct
PTQGSAKLK

SEQ ID NO: 47101 - protein, 9 aa, synthetic construct
PTQGSAKVK

SEQ ID NO: 47102 - protein, 9 aa, synthetic construct
PTQGSGRLR

SEQ ID NO: 47103 - protein, 9 aa, synthetic construct
PTQGSGRLK

SEQ ID NO: 47104 - protein, 9 aa, synthetic construct
PTQGSGKLR

SEQ ID NO: 47105 - protein, 9 aa, synthetic construct
PTQGSGKLK

SEQ ID NO: 47106 - protein, 9 aa, synthetic construct
PTQGVVRLR

SEQ ID NO: 47107 - protein, 9 aa, synthetic construct
PTQGVLRLR

SEQ ID NO: 47108 - protein, 9 aa, synthetic construct
PTQGVLRLK

SEQ ID NO: 47109 - protein, 9 aa, synthetic construct
PTQGVLKVR

SEQ ID NO: 47110 - protein, 9 aa, synthetic construct
PTQGVARLR

SEQ ID NO: 47111 - protein, 9 aa, synthetic construct
PTQGVARLK

SEQ ID NO: 47112 - protein, 9 aa, synthetic construct
PTQGVARVK

SEQ ID NO: 47113 - protein, 9 aa, synthetic construct
PTQGVIRVR

SEQ ID NO: 47114 - protein, 9 aa, synthetic construct
PTQGVIRVK

SEQ ID NO: 47115 - protein, 9 aa, synthetic construct
PTQGVIKVR

SEQ ID NO: 47116 - protein, 9 aa, synthetic construct
PTQGVGRLK

SEQ ID NO: 47117 - protein, 9 aa, synthetic construct
PTQGVGKVK

SEQ ID NO: 47118 - protein, 9 aa, synthetic construct
PTQGGVHVH

SEQ ID NO: 47119 - protein, 9 aa, synthetic construct
PTQGGVRLK

SEQ ID NO: 47120 - protein, 9 aa, synthetic construct
PTQGGVKVR

SEQ ID NO: 47121 - protein, 9 aa, synthetic construct
PTQGGLRLY

SEQ ID NO: 47122 - protein, 9 aa, synthetic construct
PTQGGLRLR

SEQ ID NO: 47123 - protein, 9 aa, synthetic construct
PTQGGLRLK

SEQ ID NO: 47124 - protein, 9 aa, synthetic construct
PTQGGLRLF

SEQ ID NO: 47125 - protein, 9 aa, synthetic construct
PTQGGLKLR

SEQ ID NO: 47126 - protein, 9 aa, synthetic construct
PTQGGLKLK

SEQ ID NO: 47127 - protein, 9 aa, synthetic construct
PTQGGLKVR

SEQ ID NO: 47128 - protein, 9 aa, synthetic construct
PTQGGLKVK

SEQ ID NO: 47129 - protein, 9 aa, synthetic construct
PTQGGARLR

SEQ ID NO: 47130 - protein, 9 aa, synthetic construct
PTQGGARVK

SEQ ID NO: 47131 - protein, 9 aa, synthetic construct
PTQGGIKLR

SEQ ID NO: 47132 - protein, 9 aa, synthetic construct
PTQGGGRVR

SEQ ID NO: 47133 - protein, 9 aa, synthetic construct
PTQGGGRVK

SEQ ID NO: 47134 - protein, 9 aa, synthetic construct
PTQGGGKLK

SEQ ID NO: 47135 - protein, 9 aa, synthetic construct
PTQAAVRLR

SEQ ID NO: 47136 - protein, 9 aa, synthetic construct
PTQAALRLR

SEQ ID NO: 47137 - protein, 9 aa, synthetic construct
PTQAALRLK

SEQ ID NO: 47138 - protein, 9 aa, synthetic construct
PTQAALRVY

SEQ ID NO: 47139 - protein, 9 aa, synthetic construct
PTQAALRVR

SEQ ID NO: 47140 - protein, 9 aa, synthetic construct
PTQAALKLR

SEQ ID NO: 47141 - protein, 9 aa, synthetic construct
PTQAAARLR

SEQ ID NO: 47142 - protein, 9 aa, synthetic construct
PTQAAARLK

SEQ ID NO: 47143 - protein, 9 aa, synthetic construct
PTQAAIRLK

SEQ ID NO: 47144 - protein, 9 aa, synthetic construct
PTQAAIKVK

SEQ ID NO: 47145 - protein, 9 aa, synthetic construct
PTQATVRLK

SEQ ID NO: 47146 - protein, 9 aa, synthetic construct
PTQATVRVK

SEQ ID NO: 47147 - protein, 9 aa, synthetic construct
PTQATLRLR

SEQ ID NO: 47148 - protein, 9 aa, synthetic construct
PTQATLRLK

SEQ ID NO: 47149 - protein, 9 aa, synthetic construct
PTQATLKLR

SEQ ID NO: 47150 - protein, 9 aa, synthetic construct
PTQATARLR

SEQ ID NO: 47151 - protein, 9 aa, synthetic construct
PTQATARVR

SEQ ID NO: 47152 - protein, 9 aa, synthetic construct
PTQATARVK

SEQ ID NO: 47153 - protein, 9 aa, synthetic construct
PTQATAKLK

SEQ ID NO: 47154 - protein, 9 aa, synthetic construct
PTQATIRLR

SEQ ID NO: 47155 - protein, 9 aa, synthetic construct
PTQATIRLK

SEQ ID NO: 47156 - protein, 9 aa, synthetic construct
PTQATIRVR

SEQ ID NO: 47157 - protein, 9 aa, synthetic construct
PTQATGRVR

SEQ ID NO: 47158 - protein, 9 aa, synthetic construct
PTQATGKLK

SEQ ID NO: 47159 - protein, 9 aa, synthetic construct
PTQATGKVR

SEQ ID NO: 47160 - protein, 9 aa, synthetic construct
PTQASVHVH

SEQ ID NO: 47161 - protein, 9 aa, synthetic construct
PTQASVRLK

SEQ ID NO: 47162 - protein, 9 aa, synthetic construct
PTQASVKVR

SEQ ID NO: 47163 - protein, 9 aa, synthetic construct
PTQASLRLR

SEQ ID NO: 47164 - protein, 9 aa, synthetic construct
PTQASLRLK

SEQ ID NO: 47165 - protein, 9 aa, synthetic construct
PTQASLRLF

SEQ ID NO: 47166 - protein, 9 aa, synthetic construct
PTQASLRVR

SEQ ID NO: 47167 - protein, 9 aa, synthetic construct
PTQASLRVK

SEQ ID NO: 47168 - protein, 9 aa, synthetic construct
PTQASLKLR

SEQ ID NO: 47169 - protein, 9 aa, synthetic construct
PTQASARLR

SEQ ID NO: 47170 - protein, 9 aa, synthetic construct
PTQASARVR

SEQ ID NO: 47171 - protein, 9 aa, synthetic construct
PTQASARVK

SEQ ID NO: 47172 - protein, 9 aa, synthetic construct
PTQASAKVR

SEQ ID NO: 47173 - protein, 9 aa, synthetic construct
PTQASIRLR

SEQ ID NO: 47174 - protein, 9 aa, synthetic construct
PTQASIKVK

SEQ ID NO: 47175 - protein, 9 aa, synthetic construct
PTQASGRLK

SEQ ID NO: 47176 - protein, 9 aa, synthetic construct
PTQASGRVR

SEQ ID NO: 47177 - protein, 9 aa, synthetic construct
PTQASGRVK

SEQ ID NO: 47178 - protein, 9 aa, synthetic construct
PTQASGKLK

SEQ ID NO: 47179 - protein, 9 aa, synthetic construct
PTQASGKVR

SEQ ID NO: 47180 - protein, 9 aa, synthetic construct
PTQAVVHLF

SEQ ID NO: 47181 - protein, 9 aa, synthetic construct
PTQAVVRLR

SEQ ID NO: 47182 - protein, 9 aa, synthetic construct
PTQAVVRVR

SEQ ID NO: 47183 - protein, 9 aa, synthetic construct
PTQAVVRVK

SEQ ID NO: 47184 - protein, 9 aa, synthetic construct
PTQAVVKVR

SEQ ID NO: 47185 - protein, 9 aa, synthetic construct
PTQAVLHLY

SEQ ID NO: 47186 - protein, 9 aa, synthetic construct
PTQAVLHLR

SEQ ID NO: 47187 - protein, 9 aa, synthetic construct
PTQAVLHLH

SEQ ID NO: 47188 - protein, 9 aa, synthetic construct
PTQAVLHLK

SEQ ID NO: 47189 - protein, 9 aa, synthetic construct
PTQAVLHLF

SEQ ID NO: 47190 - protein, 9 aa, synthetic construct
PTQAVLHVY

SEQ ID NO: 47191 - protein, 9 aa, synthetic construct
PTQAVLHVR

SEQ ID NO: 47192 - protein, 9 aa, synthetic construct
PTQAVLHVK

SEQ ID NO: 47193 - protein, 9 aa, synthetic construct
PTQAVLRLY

SEQ ID NO: 47194 - protein, 9 aa, synthetic construct
PTQAVLRVY

SEQ ID NO: 47195 - protein, 9 aa, synthetic construct
PTQAVLKLY

SEQ ID NO: 47196 - protein, 9 aa, synthetic construct
PTQAVLKLK

SEQ ID NO: 47197 - protein, 9 aa, synthetic construct
PTQAVARLR

SEQ ID NO: 47198 - protein, 9 aa, synthetic construct
PTQAVARLH

SEQ ID NO: 47199 - protein, 9 aa, synthetic construct
PTQAVARLK

SEQ ID NO: 47200 - protein, 9 aa, synthetic construct
PTQAVARLF

SEQ ID NO: 47201 - protein, 9 aa, synthetic construct
PTQAVARVR

SEQ ID NO: 47202 - protein, 9 aa, synthetic construct
PTQAVARVK

SEQ ID NO: 47203 - protein, 9 aa, synthetic construct
PTQAVAKLR

SEQ ID NO: 47204 - protein, 9 aa, synthetic construct
PTQAVAKLK

SEQ ID NO: 47205 - protein, 9 aa, synthetic construct
PTQAVAKVK

SEQ ID NO: 47206 - protein, 9 aa, synthetic construct
PTQAVIRVR

SEQ ID NO: 47207 - protein, 9 aa, synthetic construct
PTQAVIKLR

SEQ ID NO: 47208 - protein, 9 aa, synthetic construct
PTQAVIKVF

SEQ ID NO: 47209 - protein, 9 aa, synthetic construct
PTQAVGRLK

SEQ ID NO: 47210 - protein, 9 aa, synthetic construct
PTQAGVHLY

SEQ ID NO: 47211 - protein, 9 aa, synthetic construct
PTQAGVHLR

SEQ ID NO: 47212 - protein, 9 aa, synthetic construct
PTQAGVHLK

SEQ ID NO: 47213 - protein, 9 aa, synthetic construct
PTQAGVHLF

SEQ ID NO: 47214 - protein, 9 aa, synthetic construct
PTQAGVRLR

SEQ ID NO: 47215 - protein, 9 aa, synthetic construct
PTQAGVRLK

SEQ ID NO: 47216 - protein, 9 aa, synthetic construct
PTQAGVKLK

SEQ ID NO: 47217 - protein, 9 aa, synthetic construct
PTQAGLHLR

SEQ ID NO: 47218 - protein, 9 aa, synthetic construct
PTQAGLHLH

SEQ ID NO: 47219 - protein, 9 aa, synthetic construct
PTQAGLHLK

SEQ ID NO: 47220 - protein, 9 aa, synthetic construct
PTQAGLHLF

SEQ ID NO: 47221 - protein, 9 aa, synthetic construct
PTQAGLHVR

SEQ ID NO: 47222 - protein, 9 aa, synthetic construct
PTQAGLHVK

SEQ ID NO: 47223 - protein, 9 aa, synthetic construct
PTQAGLHVF

SEQ ID NO: 47224 - protein, 9 aa, synthetic construct
PTQAGLRLY

SEQ ID NO: 47225 - protein, 9 aa, synthetic construct
PTQAGLRLR

SEQ ID NO: 47226 - protein, 9 aa, synthetic construct
PTQAGLRLH

SEQ ID NO: 47227 - protein, 9 aa, synthetic construct
PTQAGLRLK

SEQ ID NO: 47228 - protein, 9 aa, synthetic construct
PTQAGLRLF

SEQ ID NO: 47229 - protein, 9 aa, synthetic construct
PTQAGLRVY

SEQ ID NO: 47230 - protein, 9 aa, synthetic construct
PTQAGLRVR

SEQ ID NO: 47231 - protein, 9 aa, synthetic construct
PTQAGLRVK

SEQ ID NO: 47232 - protein, 9 aa, synthetic construct
PTQAGLKLR

SEQ ID NO: 47233 - protein, 9 aa, synthetic construct
PTQAGLKLK

SEQ ID NO: 47234 - protein, 9 aa, synthetic construct
PTQAGLKVR

SEQ ID NO: 47235 - protein, 9 aa, synthetic construct
PTQAGLKVK

SEQ ID NO: 47236 - protein, 9 aa, synthetic construct
PTQAGARLR

SEQ ID NO: 47237 - protein, 9 aa, synthetic construct
PTQAGAKLK

SEQ ID NO: 47238 - protein, 9 aa, synthetic construct
PTQAGAKVR

SEQ ID NO: 47239 - protein, 9 aa, synthetic construct
PTQAGAKVK

SEQ ID NO: 47240 - protein, 9 aa, synthetic construct
PTQAGIRLR

SEQ ID NO: 47241 - protein, 9 aa, synthetic construct
PTQAGIRLK

SEQ ID NO: 47242 - protein, 9 aa, synthetic construct
PTQAGIRVK

SEQ ID NO: 47243 - protein, 9 aa, synthetic construct
PTQAGIKLR

SEQ ID NO: 47244 - protein, 9 aa, synthetic construct
PTQAGIKVR

SEQ ID NO: 47245 - protein, 9 aa, synthetic construct
PTQAGIKVK

SEQ ID NO: 47246 - protein, 9 aa, synthetic construct
PTQAGGRLR

SEQ ID NO: 47247 - protein, 9 aa, synthetic construct
PTQAGGRLK

SEQ ID NO: 47248 - protein, 9 aa, synthetic construct
PTQAGGRVR

SEQ ID NO: 47249 - protein, 9 aa, synthetic construct
PTQAGGRVK

SEQ ID NO: 47250 - protein, 9 aa, synthetic construct
PTQAGGKLK

SEQ ID NO: 47251 - protein, 9 aa, synthetic construct
PTQAGGKVK

SEQ ID NO: 47252 - protein, 9 aa, synthetic construct
PTPGAVRLR

SEQ ID NO: 47253 - protein, 9 aa, synthetic construct
PTPGALRLR

SEQ ID NO: 47254 - protein, 9 aa, synthetic construct
PTPGTVRVR

SEQ ID NO: 47255 - protein, 9 aa, synthetic construct
PTPGTVRVK

SEQ ID NO: 47256 - protein, 9 aa, synthetic construct
PTPGTLRLK

SEQ ID NO: 47257 - protein, 9 aa, synthetic construct
PTPGTARLR

SEQ ID NO: 47258 - protein, 9 aa, synthetic construct
PTPGTARVR

SEQ ID NO: 47259 - protein, 9 aa, synthetic construct
PTPGTARVK

SEQ ID NO: 47260 - protein, 9 aa, synthetic construct
PTPGSVHVH

SEQ ID NO: 47261 - protein, 9 aa, synthetic construct
PTPGSVRLK

SEQ ID NO: 47262 - protein, 9 aa, synthetic construct
PTPGSVRVR

SEQ ID NO: 47263 - protein, 9 aa, synthetic construct
PTPGSLRLH

SEQ ID NO: 47264 - protein, 9 aa, synthetic construct
PTPGSLRLK

SEQ ID NO: 47265 - protein, 9 aa, synthetic construct
PTPGSLRLF

SEQ ID NO: 47266 - protein, 9 aa, synthetic construct
PTPGSLRVR

SEQ ID NO: 47267 - protein, 9 aa, synthetic construct
PTPGSLRVK

SEQ ID NO: 47268 - protein, 9 aa, synthetic construct
PTPGSLKLK

SEQ ID NO: 47269 - protein, 9 aa, synthetic construct
PTPGSLKVR

SEQ ID NO: 47270 - protein, 9 aa, synthetic construct
PTPGSLKVK

SEQ ID NO: 47271 - protein, 9 aa, synthetic construct
PTPGSARLR

SEQ ID NO: 47272 - protein, 9 aa, synthetic construct
PTPGSARVK

SEQ ID NO: 47273 - protein, 9 aa, synthetic construct
PTPGSAKVK

SEQ ID NO: 47274 - protein, 9 aa, synthetic construct
PTPGSIRLR

SEQ ID NO: 47275 - protein, 9 aa, synthetic construct
PTPGSIRLK

SEQ ID NO: 47276 - protein, 9 aa, synthetic construct
PTPGSIKLR

SEQ ID NO: 47277 - protein, 9 aa, synthetic construct
PTPGSGRLR

SEQ ID NO: 47278 - protein, 9 aa, synthetic construct
PTPGSGRVK

SEQ ID NO: 47279 - protein, 9 aa, synthetic construct
PTPGSGKVR

SEQ ID NO: 47280 - protein, 9 aa, synthetic construct
PTPGVVHLF

SEQ ID NO: 47281 - protein, 9 aa, synthetic construct
PTPGVVRVR

SEQ ID NO: 47282 - protein, 9 aa, synthetic construct
PTPGVVRVK

SEQ ID NO: 47283 - protein, 9 aa, synthetic construct
PTPGVVKLR

SEQ ID NO: 47284 - protein, 9 aa, synthetic construct
PTPGVARLK

SEQ ID NO: 47285 - protein, 9 aa, synthetic construct
PTPGVARVK

SEQ ID NO: 47286 - protein, 9 aa, synthetic construct
PTPGVAKLR

SEQ ID NO: 47287 - protein, 9 aa, synthetic construct
PTPGVAKLK

SEQ ID NO: 47288 - protein, 9 aa, synthetic construct
PTPGVAKVK

SEQ ID NO: 47289 - protein, 9 aa, synthetic construct
PTPGVIRLK

SEQ ID NO: 47290 - protein, 9 aa, synthetic construct
PTPGGVHVH

SEQ ID NO: 47291 - protein, 9 aa, synthetic construct
PTPGGLHLY

SEQ ID NO: 47292 - protein, 9 aa, synthetic construct
PTPGGLHLR

SEQ ID NO: 47293 - protein, 9 aa, synthetic construct
PTPGGLHLK

SEQ ID NO: 47294 - protein, 9 aa, synthetic construct
PTPGGLHLF

SEQ ID NO: 47295 - protein, 9 aa, synthetic construct
PTPGGLRLR

SEQ ID NO: 47296 - protein, 9 aa, synthetic construct
PTPGGLRLK

SEQ ID NO: 47297 - protein, 9 aa, synthetic construct
PTPGGLRVR

SEQ ID NO: 47298 - protein, 9 aa, synthetic construct
PTPGGLKVK

SEQ ID NO: 47299 - protein, 9 aa, synthetic construct
PTPGGARLR

SEQ ID NO: 47300 - protein, 9 aa, synthetic construct
PTPGGARLK

SEQ ID NO: 47301 - protein, 9 aa, synthetic construct
PTPGGARVK

SEQ ID NO: 47302 - protein, 9 aa, synthetic construct
PTPGGAKLK

SEQ ID NO: 47303 - protein, 9 aa, synthetic construct
PTPGGAKVK

SEQ ID NO: 47304 - protein, 9 aa, synthetic construct
PTPGGIRLR

SEQ ID NO: 47305 - protein, 9 aa, synthetic construct
PTPGGGRLR

SEQ ID NO: 47306 - protein, 9 aa, synthetic construct
PTPAALRLK

SEQ ID NO: 47307 - protein, 9 aa, synthetic construct
PTPAALKVR

SEQ ID NO: 47308 - protein, 9 aa, synthetic construct
PTPAAGRLR

SEQ ID NO: 47309 - protein, 9 aa, synthetic construct
PTPATVHVF

SEQ ID NO: 47310 - protein, 9 aa, synthetic construct
PTPATVRLK

SEQ ID NO: 47311 - protein, 9 aa, synthetic construct
PTPATVRVK

SEQ ID NO: 47312 - protein, 9 aa, synthetic construct
PTPATVKLK

SEQ ID NO: 47313 - protein, 9 aa, synthetic construct
PTPATVKVK

SEQ ID NO: 47314 - protein, 9 aa, synthetic construct
PTPATLKVR

SEQ ID NO: 47315 - protein, 9 aa, synthetic construct
PTPATLKVK

SEQ ID NO: 47316 - protein, 9 aa, synthetic construct
PTPATAHLF

SEQ ID NO: 47317 - protein, 9 aa, synthetic construct
PTPATARVR

SEQ ID NO: 47318 - protein, 9 aa, synthetic construct
PTPATIHLY

SEQ ID NO: 47319 - protein, 9 aa, synthetic construct
PTPATIHLH

SEQ ID NO: 47320 - protein, 9 aa, synthetic construct
PTPATIHLF

SEQ ID NO: 47321 - protein, 9 aa, synthetic construct
PTPATIHVY

SEQ ID NO: 47322 - protein, 9 aa, synthetic construct
PTPATIHVR

SEQ ID NO: 47323 - protein, 9 aa, synthetic construct
PTPATIHVH

SEQ ID NO: 47324 - protein, 9 aa, synthetic construct
PTPATIHVK

SEQ ID NO: 47325 - protein, 9 aa, synthetic construct
PTPATIHVF

SEQ ID NO: 47326 - protein, 9 aa, synthetic construct
PTPATIRLY

SEQ ID NO: 47327 - protein, 9 aa, synthetic construct
PTPATIRLR

SEQ ID NO: 47328 - protein, 9 aa, synthetic construct
PTPATIRLH

SEQ ID NO: 47329 - protein, 9 aa, synthetic construct
PTPATIRLK

SEQ ID NO: 47330 - protein, 9 aa, synthetic construct
PTPATIRLF

SEQ ID NO: 47331 - protein, 9 aa, synthetic construct
PTPATIRVH

SEQ ID NO: 47332 - protein, 9 aa, synthetic construct
PTPATIRVK

SEQ ID NO: 47333 - protein, 9 aa, synthetic construct
PTPATIKLY

SEQ ID NO: 47334 - protein, 9 aa, synthetic construct
PTPATIKLR

SEQ ID NO: 47335 - protein, 9 aa, synthetic construct
PTPATIKLH

SEQ ID NO: 47336 - protein, 9 aa, synthetic construct
PTPATIKLK

SEQ ID NO: 47337 - protein, 9 aa, synthetic construct
PTPATIKLF

SEQ ID NO: 47338 - protein, 9 aa, synthetic construct
PTPATIKVY

SEQ ID NO: 47339 - protein, 9 aa, synthetic construct
PTPATIKVH

SEQ ID NO: 47340 - protein, 9 aa, synthetic construct
PTPATIKVK

SEQ ID NO: 47341 - protein, 9 aa, synthetic construct
PTPATGKLR

SEQ ID NO: 47342 - protein, 9 aa, synthetic construct
PTPATGKVK

SEQ ID NO: 47343 - protein, 9 aa, synthetic construct
PTPASVHVH

SEQ ID NO: 47344 - protein, 9 aa, synthetic construct
PTPASVRLR

SEQ ID NO: 47345 - protein, 9 aa, synthetic construct
PTPASVKVR

SEQ ID NO: 47346 - protein, 9 aa, synthetic construct
PTPASLRLY

SEQ ID NO: 47347 - protein, 9 aa, synthetic construct
PTPASLRLR

SEQ ID NO: 47348 - protein, 9 aa, synthetic construct
PTPASLRLK

SEQ ID NO: 47349 - protein, 9 aa, synthetic construct
PTPASLRLF

SEQ ID NO: 47350 - protein, 9 aa, synthetic construct
PTPASLRVY

SEQ ID NO: 47351 - protein, 9 aa, synthetic construct
PTPASLRVR

SEQ ID NO: 47352 - protein, 9 aa, synthetic construct
PTPASLKLK

SEQ ID NO: 47353 - protein, 9 aa, synthetic construct
PTPASAKLK

SEQ ID NO: 47354 - protein, 9 aa, synthetic construct
PTPASAKVR

SEQ ID NO: 47355 - protein, 9 aa, synthetic construct
PTPASIRLR

SEQ ID NO: 47356 - protein, 9 aa, synthetic construct
PTPASGRVR

SEQ ID NO: 47357 - protein, 9 aa, synthetic construct
PTPASGKLK

SEQ ID NO: 47358 - protein, 9 aa, synthetic construct
PTPASGKVR

SEQ ID NO: 47359 - protein, 9 aa, synthetic construct
PTPAVVHLF

SEQ ID NO: 47360 - protein, 9 aa, synthetic construct
PTPAVVRLR

SEQ ID NO: 47361 - protein, 9 aa, synthetic construct
PTPAVVRLF

SEQ ID NO: 47362 - protein, 9 aa, synthetic construct
PTPAVVRVK

SEQ ID NO: 47363 - protein, 9 aa, synthetic construct
PTPAVLHLY

SEQ ID NO: 47364 - protein, 9 aa, synthetic construct
PTPAVLHLK

SEQ ID NO: 47365 - protein, 9 aa, synthetic construct
PTPAVLHLF

SEQ ID NO: 47366 - protein, 9 aa, synthetic construct
PTPAVLHVY

SEQ ID NO: 47367 - protein, 9 aa, synthetic construct
PTPAVLHVR

SEQ ID NO: 47368 - protein, 9 aa, synthetic construct
PTPAVLHVF

SEQ ID NO: 47369 - protein, 9 aa, synthetic construct
PTPAVLRLY

SEQ ID NO: 47370 - protein, 9 aa, synthetic construct
PTPAVLRLR

SEQ ID NO: 47371 - protein, 9 aa, synthetic construct
PTPAVLRLH

SEQ ID NO: 47372 - protein, 9 aa, synthetic construct
PTPAVLRLK

SEQ ID NO: 47373 - protein, 9 aa, synthetic construct
PTPAVLRVY

SEQ ID NO: 47374 - protein, 9 aa, synthetic construct
PTPAVLRVR

SEQ ID NO: 47375 - protein, 9 aa, synthetic construct
PTPAVLRVF

SEQ ID NO: 47376 - protein, 9 aa, synthetic construct
PTPAVLKLR

SEQ ID NO: 47377 - protein, 9 aa, synthetic construct
PTPAVLKVK

SEQ ID NO: 47378 - protein, 9 aa, synthetic construct
PTPAVARLR

SEQ ID NO: 47379 - protein, 9 aa, synthetic construct
PTPAVARLK

SEQ ID NO: 47380 - protein, 9 aa, synthetic construct
PTPAVARVR

SEQ ID NO: 47381 - protein, 9 aa, synthetic construct
PTPAVARVK

SEQ ID NO: 47382 - protein, 9 aa, synthetic construct
PTPAVAKVK

SEQ ID NO: 47383 - protein, 9 aa, synthetic construct
PTPAVIRVK

SEQ ID NO: 47384 - protein, 9 aa, synthetic construct
PTPAVIKVR

SEQ ID NO: 47385 - protein, 9 aa, synthetic construct
PTPAVIKVK

SEQ ID NO: 47386 - protein, 9 aa, synthetic construct
PTPAVGRLR

SEQ ID NO: 47387 - protein, 9 aa, synthetic construct
PTPAVGRLK

SEQ ID NO: 47388 - protein, 9 aa, synthetic construct
PTPAGVHLR

SEQ ID NO: 47389 - protein, 9 aa, synthetic construct
PTPAGVHLH

SEQ ID NO: 47390 - protein, 9 aa, synthetic construct
PTPAGVHVH

SEQ ID NO: 47391 - protein, 9 aa, synthetic construct
PTPAGVRLR

SEQ ID NO: 47392 - protein, 9 aa, synthetic construct
PTPAGVRLK

SEQ ID NO: 47393 - protein, 9 aa, synthetic construct
PTPAGVKLR

SEQ ID NO: 47394 - protein, 9 aa, synthetic construct
PTPAGVKLK

SEQ ID NO: 47395 - protein, 9 aa, synthetic construct
PTPAGVKVR

SEQ ID NO: 47396 - protein, 9 aa, synthetic construct
PTPAGLHLY

SEQ ID NO: 47397 - protein, 9 aa, synthetic construct
PTPAGLHLR

SEQ ID NO: 47398 - protein, 9 aa, synthetic construct
PTPAGLHLH

SEQ ID NO: 47399 - protein, 9 aa, synthetic construct
PTPAGLHLK

SEQ ID NO: 47400 - protein, 9 aa, synthetic construct
PTPAGLHLF

SEQ ID NO: 47401 - protein, 9 aa, synthetic construct
PTPAGLHVY

SEQ ID NO: 47402 - protein, 9 aa, synthetic construct
PTPAGLHVH

SEQ ID NO: 47403 - protein, 9 aa, synthetic construct
PTPAGLHVF

SEQ ID NO: 47404 - protein, 9 aa, synthetic construct
PTPAGLRLY

SEQ ID NO: 47405 - protein, 9 aa, synthetic construct
PTPAGLRLR

SEQ ID NO: 47406 - protein, 9 aa, synthetic construct
PTPAGLRLH

SEQ ID NO: 47407 - protein, 9 aa, synthetic construct
PTPAGLRLK

SEQ ID NO: 47408 - protein, 9 aa, synthetic construct
PTPAGLRLF

SEQ ID NO: 47409 - protein, 9 aa, synthetic construct
PTPAGLRVY

SEQ ID NO: 47410 - protein, 9 aa, synthetic construct
PTPAGLRVR

SEQ ID NO: 47411 - protein, 9 aa, synthetic construct
PTPAGLRVK

SEQ ID NO: 47412 - protein, 9 aa, synthetic construct
PTPAGLKLY

SEQ ID NO: 47413 - protein, 9 aa, synthetic construct
PTPAGLKLR

SEQ ID NO: 47414 - protein, 9 aa, synthetic construct
PTPAGLKLK

SEQ ID NO: 47415 - protein, 9 aa, synthetic construct
PTPAGLKVR

SEQ ID NO: 47416 - protein, 9 aa, synthetic construct
PTPAGARVR

SEQ ID NO: 47417 - protein, 9 aa, synthetic construct
PTPAGAKLK

SEQ ID NO: 47418 - protein, 9 aa, synthetic construct
PTPAGAKVR

SEQ ID NO: 47419 - protein, 9 aa, synthetic construct
PTPAGIRLK

SEQ ID NO: 47420 - protein, 9 aa, synthetic construct
PTPAGIRVK

SEQ ID NO: 47421 - protein, 9 aa, synthetic construct
PTPAGIKLK

SEQ ID NO: 47422 - protein, 9 aa, synthetic construct
PTPAGIKVK

SEQ ID NO: 47423 - protein, 9 aa, synthetic construct
PTPAGGKLR

SEQ ID NO: 47424 - protein, 9 aa, synthetic construct
PTPAGGKVR

SEQ ID NO: 47425 - protein, 9 aa, synthetic construct
PSNGAVRVR

SEQ ID NO: 47426 - protein, 9 aa, synthetic construct
PSNGAVRVK

SEQ ID NO: 47427 - protein, 9 aa, synthetic construct
PSNGALRLR

SEQ ID NO: 47428 - protein, 9 aa, synthetic construct
PSNGALRLK

SEQ ID NO: 47429 - protein, 9 aa, synthetic construct
PSNGALRLF

SEQ ID NO: 47430 - protein, 9 aa, synthetic construct
PSNGALRVY

SEQ ID NO: 47431 - protein, 9 aa, synthetic construct
PSNGALKLK

SEQ ID NO: 47432 - protein, 9 aa, synthetic construct
PSNGAARLR

SEQ ID NO: 47433 - protein, 9 aa, synthetic construct
PSNGAARVK

SEQ ID NO: 47434 - protein, 9 aa, synthetic construct
PSNGAAKLK

SEQ ID NO: 47435 - protein, 9 aa, synthetic construct
PSNGAAKVR

SEQ ID NO: 47436 - protein, 9 aa, synthetic construct
PSNGAAKVK

SEQ ID NO: 47437 - protein, 9 aa, synthetic construct
PSNGAIRVK

SEQ ID NO: 47438 - protein, 9 aa, synthetic construct
PSNGAIKLR

SEQ ID NO: 47439 - protein, 9 aa, synthetic construct
PSNGAIKVK

SEQ ID NO: 47440 - protein, 9 aa, synthetic construct
PSNGAGRLK

SEQ ID NO: 47441 - protein, 9 aa, synthetic construct
PSNGAGKLK

SEQ ID NO: 47442 - protein, 9 aa, synthetic construct
PSNGTVRLR

SEQ ID NO: 47443 - protein, 9 aa, synthetic construct
PSNGTVRLK

SEQ ID NO: 47444 - protein, 9 aa, synthetic construct
PSNGTVRVK

SEQ ID NO: 47445 - protein, 9 aa, synthetic construct
PSNGTLRLR

SEQ ID NO: 47446 - protein, 9 aa, synthetic construct
PSNGTLRVR

SEQ ID NO: 47447 - protein, 9 aa, synthetic construct
PSNGTARLR

SEQ ID NO: 47448 - protein, 9 aa, synthetic construct
PSNGTARLK

SEQ ID NO: 47449 - protein, 9 aa, synthetic construct
PSNGTAKLK

SEQ ID NO: 47450 - protein, 9 aa, synthetic construct
PSNGTIKVK

SEQ ID NO: 47451 - protein, 9 aa, synthetic construct
PSNGTGKVR

SEQ ID NO: 47452 - protein, 9 aa, synthetic construct
PSNGSVHVH

SEQ ID NO: 47453 - protein, 9 aa, synthetic construct
PSNGSVRLR

SEQ ID NO: 47454 - protein, 9 aa, synthetic construct
PSNGSVRLK

SEQ ID NO: 47455 - protein, 9 aa, synthetic construct
PSNGSVRVR

SEQ ID NO: 47456 - protein, 9 aa, synthetic construct
PSNGSVKLR

SEQ ID NO: 47457 - protein, 9 aa, synthetic construct
PSNGSVKLK

SEQ ID NO: 47458 - protein, 9 aa, synthetic construct
PSNGSLRLY

SEQ ID NO: 47459 - protein, 9 aa, synthetic construct
PSNGSLRLR

SEQ ID NO: 47460 - protein, 9 aa, synthetic construct
PSNGSLRLK

SEQ ID NO: 47461 - protein, 9 aa, synthetic construct
PSNGSLRLF

SEQ ID NO: 47462 - protein, 9 aa, synthetic construct
PSNGSLRVH

SEQ ID NO: 47463 - protein, 9 aa, synthetic construct
PSNGSLRVF

SEQ ID NO: 47464 - protein, 9 aa, synthetic construct
PSNGSLKLK

SEQ ID NO: 47465 - protein, 9 aa, synthetic construct
PSNGSLKVR

SEQ ID NO: 47466 - protein, 9 aa, synthetic construct
PSNGSLKVK

SEQ ID NO: 47467 - protein, 9 aa, synthetic construct
PSNGSARLR

SEQ ID NO: 47468 - protein, 9 aa, synthetic construct
PSNGSARLK

SEQ ID NO: 47469 - protein, 9 aa, synthetic construct
PSNGSARVR

SEQ ID NO: 47470 - protein, 9 aa, synthetic construct
PSNGSAKVK

SEQ ID NO: 47471 - protein, 9 aa, synthetic construct
PSNGSIRLK

SEQ ID NO: 47472 - protein, 9 aa, synthetic construct
PSNGSIKLR

SEQ ID NO: 47473 - protein, 9 aa, synthetic construct
PSNGSIKLK

SEQ ID NO: 47474 - protein, 9 aa, synthetic construct
PSNGSGHVK

SEQ ID NO: 47475 - protein, 9 aa, synthetic construct
PSNGSGRLR

SEQ ID NO: 47476 - protein, 9 aa, synthetic construct
PSNGSGRLK

SEQ ID NO: 47477 - protein, 9 aa, synthetic construct
PSNGSGRVK

SEQ ID NO: 47478 - protein, 9 aa, synthetic construct
PSNGSGKLR

SEQ ID NO: 47479 - protein, 9 aa, synthetic construct
PSNGSGKLK

SEQ ID NO: 47480 - protein, 9 aa, synthetic construct
PSNGVVRLR

SEQ ID NO: 47481 - protein, 9 aa, synthetic construct
PSNGVVRLK

SEQ ID NO: 47482 - protein, 9 aa, synthetic construct
PSNGVVKLR

SEQ ID NO: 47483 - protein, 9 aa, synthetic construct
PSNGVVKVR

SEQ ID NO: 47484 - protein, 9 aa, synthetic construct
PSNGVLHLR

SEQ ID NO: 47485 - protein, 9 aa, synthetic construct
PSNGVLRLK

SEQ ID NO: 47486 - protein, 9 aa, synthetic construct
PSNGVLRVY

SEQ ID NO: 47487 - protein, 9 aa, synthetic construct
PSNGVLRVR

SEQ ID NO: 47488 - protein, 9 aa, synthetic construct
PSNGVLRVK

SEQ ID NO: 47489 - protein, 9 aa, synthetic construct
PSNGVLRVF

SEQ ID NO: 47490 - protein, 9 aa, synthetic construct
PSNGVLKVR

SEQ ID NO: 47491 - protein, 9 aa, synthetic construct
PSNGVLKVK

SEQ ID NO: 47492 - protein, 9 aa, synthetic construct
PSNGVARVR

SEQ ID NO: 47493 - protein, 9 aa, synthetic construct
PSNGVARVK

SEQ ID NO: 47494 - protein, 9 aa, synthetic construct
PSNGVAKLK

SEQ ID NO: 47495 - protein, 9 aa, synthetic construct
PSNGVAKVK

SEQ ID NO: 47496 - protein, 9 aa, synthetic construct
PSNGVIHLF

SEQ ID NO: 47497 - protein, 9 aa, synthetic construct
PSNGVIRVY

SEQ ID NO: 47498 - protein, 9 aa, synthetic construct
PSNGVGRLR

SEQ ID NO: 47499 - protein, 9 aa, synthetic construct
PSNGVGRLK

SEQ ID NO: 47500 - protein, 9 aa, synthetic construct
PSNGVGRVK

SEQ ID NO: 47501 - protein, 9 aa, synthetic construct
PSNGVGKVR

SEQ ID NO: 47502 - protein, 9 aa, synthetic construct
PSNGVGKVK

SEQ ID NO: 47503 - protein, 9 aa, synthetic construct
PSNGGVHVH

SEQ ID NO: 47504 - protein, 9 aa, synthetic construct
PSNGGVRLR

SEQ ID NO: 47505 - protein, 9 aa, synthetic construct
PSNGGVRVR

SEQ ID NO: 47506 - protein, 9 aa, synthetic construct
PSNGGLHLY

SEQ ID NO: 47507 - protein, 9 aa, synthetic construct
PSNGGLRLY

SEQ ID NO: 47508 - protein, 9 aa, synthetic construct
PSNGGLRLR

SEQ ID NO: 47509 - protein, 9 aa, synthetic construct
PSNGGLRLK

SEQ ID NO: 47510 - protein, 9 aa, synthetic construct
PSNGGLRVY

SEQ ID NO: 47511 - protein, 9 aa, synthetic construct
PSNGGLRVR

SEQ ID NO: 47512 - protein, 9 aa, synthetic construct
PSNGGLRVF

SEQ ID NO: 47513 - protein, 9 aa, synthetic construct
PSNGGLKLR

SEQ ID NO: 47514 - protein, 9 aa, synthetic construct
PSNGGLKLK

SEQ ID NO: 47515 - protein, 9 aa, synthetic construct
PSNGGLKVR

SEQ ID NO: 47516 - protein, 9 aa, synthetic construct
PSNGGARLR

SEQ ID NO: 47517 - protein, 9 aa, synthetic construct
PSNGGARLK

SEQ ID NO: 47518 - protein, 9 aa, synthetic construct
PSNGGARVK

SEQ ID NO: 47519 - protein, 9 aa, synthetic construct
PSNGGAKLR

SEQ ID NO: 47520 - protein, 9 aa, synthetic construct
PSNGGAKVK

SEQ ID NO: 47521 - protein, 9 aa, synthetic construct
PSNGGIRVR

SEQ ID NO: 47522 - protein, 9 aa, synthetic construct
PSNGGGRLR

SEQ ID NO: 47523 - protein, 9 aa, synthetic construct
PSNGGGKLR

SEQ ID NO: 47524 - protein, 9 aa, synthetic construct
PSNGGGKLK

SEQ ID NO: 47525 - protein, 9 aa, synthetic construct
PSNAAVRLR

SEQ ID NO: 47526 - protein, 9 aa, synthetic construct
PSNAAVRLK

SEQ ID NO: 47527 - protein, 9 aa, synthetic construct
PSNAAVRVR

SEQ ID NO: 47528 - protein, 9 aa, synthetic construct
PSNAAVKLR

SEQ ID NO: 47529 - protein, 9 aa, synthetic construct
PSNAALRLR

SEQ ID NO: 47530 - protein, 9 aa, synthetic construct
PSNAALRLK

SEQ ID NO: 47531 - protein, 9 aa, synthetic construct
PSNAALRVR

SEQ ID NO: 47532 - protein, 9 aa, synthetic construct
PSNAALKLR

SEQ ID NO: 47533 - protein, 9 aa, synthetic construct
PSNAALKLK

SEQ ID NO: 47534 - protein, 9 aa, synthetic construct
PSNAAAKLK

SEQ ID NO: 47535 - protein, 9 aa, synthetic construct
PSNAAIKLR

SEQ ID NO: 47536 - protein, 9 aa, synthetic construct
PSNATVRLR

SEQ ID NO: 47537 - protein, 9 aa, synthetic construct
PSNATVRLK

SEQ ID NO: 47538 - protein, 9 aa, synthetic construct
PSNATVKVR

SEQ ID NO: 47539 - protein, 9 aa, synthetic construct
PSNATLRLR

SEQ ID NO: 47540 - protein, 9 aa, synthetic construct
PSNATLRLK

SEQ ID NO: 47541 - protein, 9 aa, synthetic construct
PSNATLRVR

SEQ ID NO: 47542 - protein, 9 aa, synthetic construct
PSNATLKVK

SEQ ID NO: 47543 - protein, 9 aa, synthetic construct
PSNATARLR

SEQ ID NO: 47544 - protein, 9 aa, synthetic construct
PSNATAKLK

SEQ ID NO: 47545 - protein, 9 aa, synthetic construct
PSNATIRLK

SEQ ID NO: 47546 - protein, 9 aa, synthetic construct
PSNATIRVR

SEQ ID NO: 47547 - protein, 9 aa, synthetic construct
PSNATGRVK

SEQ ID NO: 47548 - protein, 9 aa, synthetic construct
PSNATGKLR

SEQ ID NO: 47549 - protein, 9 aa, synthetic construct
PSNATGKVK

SEQ ID NO: 47550 - protein, 9 aa, synthetic construct
PSNASVHLH

SEQ ID NO: 47551 - protein, 9 aa, synthetic construct
PSNASVRLR

SEQ ID NO: 47552 - protein, 9 aa, synthetic construct
PSNASVRLK

SEQ ID NO: 47553 - protein, 9 aa, synthetic construct
PSNASVKVR

SEQ ID NO: 47554 - protein, 9 aa, synthetic construct
PSNASLHLR

SEQ ID NO: 47555 - protein, 9 aa, synthetic construct
PSNASLHVY

SEQ ID NO: 47556 - protein, 9 aa, synthetic construct
PSNASLHVF

SEQ ID NO: 47557 - protein, 9 aa, synthetic construct
PSNASLRLR

SEQ ID NO: 47558 - protein, 9 aa, synthetic construct
PSNASLRLK

SEQ ID NO: 47559 - protein, 9 aa, synthetic construct
PSNASLRLF

SEQ ID NO: 47560 - protein, 9 aa, synthetic construct
PSNASLRVY

SEQ ID NO: 47561 - protein, 9 aa, synthetic construct
PSNASLRVR

SEQ ID NO: 47562 - protein, 9 aa, synthetic construct
PSNASLRVH

SEQ ID NO: 47563 - protein, 9 aa, synthetic construct
PSNASLRVK

SEQ ID NO: 47564 - protein, 9 aa, synthetic construct
PSNASLKLR

SEQ ID NO: 47565 - protein, 9 aa, synthetic construct
PSNASLKLK

SEQ ID NO: 47566 - protein, 9 aa, synthetic construct
PSNASLKVR

SEQ ID NO: 47567 - protein, 9 aa, synthetic construct
PSNASLKVK

SEQ ID NO: 47568 - protein, 9 aa, synthetic construct
PSNASARLK

SEQ ID NO: 47569 - protein, 9 aa, synthetic construct
PSNASARVR

SEQ ID NO: 47570 - protein, 9 aa, synthetic construct
PSNASARVK

SEQ ID NO: 47571 - protein, 9 aa, synthetic construct
PSNASAKLK

SEQ ID NO: 47572 - protein, 9 aa, synthetic construct
PSNASAKVR

SEQ ID NO: 47573 - protein, 9 aa, synthetic construct
PSNASAKVK

SEQ ID NO: 47574 - protein, 9 aa, synthetic construct
PSNASIRLY

SEQ ID NO: 47575 - protein, 9 aa, synthetic construct
PSNASIRLR

SEQ ID NO: 47576 - protein, 9 aa, synthetic construct
PSNASIRVR

SEQ ID NO: 47577 - protein, 9 aa, synthetic construct
PSNASIKVR

SEQ ID NO: 47578 - protein, 9 aa, synthetic construct
PSNASGRLK

SEQ ID NO: 47579 - protein, 9 aa, synthetic construct
PSNASGRVR

SEQ ID NO: 47580 - protein, 9 aa, synthetic construct
PSNASGRVK

SEQ ID NO: 47581 - protein, 9 aa, synthetic construct
PSNASGKLR

SEQ ID NO: 47582 - protein, 9 aa, synthetic construct
PSNAVVHLR

SEQ ID NO: 47583 - protein, 9 aa, synthetic construct
PSNAVVRLR

SEQ ID NO: 47584 - protein, 9 aa, synthetic construct
PSNAVVRVR

SEQ ID NO: 47585 - protein, 9 aa, synthetic construct
PSNAVVRVK

SEQ ID NO: 47586 - protein, 9 aa, synthetic construct
PSNAVVKVR

SEQ ID NO: 47587 - protein, 9 aa, synthetic construct
PSNAVLHLY

SEQ ID NO: 47588 - protein, 9 aa, synthetic construct
PSNAVLHLR

SEQ ID NO: 47589 - protein, 9 aa, synthetic construct
PSNAVLHLH

SEQ ID NO: 47590 - protein, 9 aa, synthetic construct
PSNAVLHLF

SEQ ID NO: 47591 - protein, 9 aa, synthetic construct
PSNAVLHVY

SEQ ID NO: 47592 - protein, 9 aa, synthetic construct
PSNAVLHVR

SEQ ID NO: 47593 - protein, 9 aa, synthetic construct
PSNAVLHVF

SEQ ID NO: 47594 - protein, 9 aa, synthetic construct
PSNAVLRLY

SEQ ID NO: 47595 - protein, 9 aa, synthetic construct
PSNAVLRLR

SEQ ID NO: 47596 - protein, 9 aa, synthetic construct
PSNAVLRLK

SEQ ID NO: 47597 - protein, 9 aa, synthetic construct
PSNAVLRVR

SEQ ID NO: 47598 - protein, 9 aa, synthetic construct
PSNAVLRVK

SEQ ID NO: 47599 - protein, 9 aa, synthetic construct
PSNAVLKLK

SEQ ID NO: 47600 - protein, 9 aa, synthetic construct
PSNAVARLY

SEQ ID NO: 47601 - protein, 9 aa, synthetic construct
PSNAVARLK

SEQ ID NO: 47602 - protein, 9 aa, synthetic construct
PSNAVARVR

SEQ ID NO: 47603 - protein, 9 aa, synthetic construct
PSNAVARVK

SEQ ID NO: 47604 - protein, 9 aa, synthetic construct
PSNAVAKVK

SEQ ID NO: 47605 - protein, 9 aa, synthetic construct
PSNAVIHVY

SEQ ID NO: 47606 - protein, 9 aa, synthetic construct
PSNAVIRVR

SEQ ID NO: 47607 - protein, 9 aa, synthetic construct
PSNAVIRVK

SEQ ID NO: 47608 - protein, 9 aa, synthetic construct
PSNAVIKVR

SEQ ID NO: 47609 - protein, 9 aa, synthetic construct
PSNAVGRLK

SEQ ID NO: 47610 - protein, 9 aa, synthetic construct
PSNAVGRVR

SEQ ID NO: 47611 - protein, 9 aa, synthetic construct
PSNAVGKLK

SEQ ID NO: 47612 - protein, 9 aa, synthetic construct
PSNAVGKVK

SEQ ID NO: 47613 - protein, 9 aa, synthetic construct
PSNAGVHVH

SEQ ID NO: 47614 - protein, 9 aa, synthetic construct
PSNAGVRLR

SEQ ID NO: 47615 - protein, 9 aa, synthetic construct
PSNAGVRLK

SEQ ID NO: 47616 - protein, 9 aa, synthetic construct
PSNAGLHLY

SEQ ID NO: 47617 - protein, 9 aa, synthetic construct
PSNAGLHLR

SEQ ID NO: 47618 - protein, 9 aa, synthetic construct
PSNAGLHLH

SEQ ID NO: 47619 - protein, 9 aa, synthetic construct
PSNAGLHLK

SEQ ID NO: 47620 - protein, 9 aa, synthetic construct
PSNAGLHVR

SEQ ID NO: 47621 - protein, 9 aa, synthetic construct
PSNAGLHVF

SEQ ID NO: 47622 - protein, 9 aa, synthetic construct
PSNAGLRLR

SEQ ID NO: 47623 - protein, 9 aa, synthetic construct
PSNAGLRLK

SEQ ID NO: 47624 - protein, 9 aa, synthetic construct
PSNAGLRLF

SEQ ID NO: 47625 - protein, 9 aa, synthetic construct
PSNAGLRVR

SEQ ID NO: 47626 - protein, 9 aa, synthetic construct
PSNAGLKLR

SEQ ID NO: 47627 - protein, 9 aa, synthetic construct
PSNAGLKLK

SEQ ID NO: 47628 - protein, 9 aa, synthetic construct
PSNAGLKVR

SEQ ID NO: 47629 - protein, 9 aa, synthetic construct
PSNAGLKVK

SEQ ID NO: 47630 - protein, 9 aa, synthetic construct
PSNAGARLR

SEQ ID NO: 47631 - protein, 9 aa, synthetic construct
PSNAGAKLK

SEQ ID NO: 47632 - protein, 9 aa, synthetic construct
PSNAGIRLR

SEQ ID NO: 47633 - protein, 9 aa, synthetic construct
PSNAGIRLK

SEQ ID NO: 47634 - protein, 9 aa, synthetic construct
PSNAGIKVR

SEQ ID NO: 47635 - protein, 9 aa, synthetic construct
PSNAGIKVK

SEQ ID NO: 47636 - protein, 9 aa, synthetic construct
PSNAGGRLR

SEQ ID NO: 47637 - protein, 9 aa, synthetic construct
PSNAGGRLK

SEQ ID NO: 47638 - protein, 9 aa, synthetic construct
PSNAGGKLR

SEQ ID NO: 47639 - protein, 9 aa, synthetic construct
PSQGAVHLY

SEQ ID NO: 47640 - protein, 9 aa, synthetic construct
PSQGAVHLH

SEQ ID NO: 47641 - protein, 9 aa, synthetic construct
PSQGAVHLK

SEQ ID NO: 47642 - protein, 9 aa, synthetic construct
PSQGAVHVF

SEQ ID NO: 47643 - protein, 9 aa, synthetic construct
PSQGAVRLY

SEQ ID NO: 47644 - protein, 9 aa, synthetic construct
PSQGAVRLR

SEQ ID NO: 47645 - protein, 9 aa, synthetic construct
PSQGAVRLH

SEQ ID NO: 47646 - protein, 9 aa, synthetic construct
PSQGAVRLK

SEQ ID NO: 47647 - protein, 9 aa, synthetic construct
PSQGAVRLF

SEQ ID NO: 47648 - protein, 9 aa, synthetic construct
PSQGAVRVY

SEQ ID NO: 47649 - protein, 9 aa, synthetic construct
PSQGAVRVH

SEQ ID NO: 47650 - protein, 9 aa, synthetic construct
PSQGAVRVK

SEQ ID NO: 47651 - protein, 9 aa, synthetic construct
PSQGAVKLR

SEQ ID NO: 47652 - protein, 9 aa, synthetic construct
PSQGAVKLH

SEQ ID NO: 47653 - protein, 9 aa, synthetic construct
PSQGAVKLK

SEQ ID NO: 47654 - protein, 9 aa, synthetic construct
PSQGAVKVR

SEQ ID NO: 47655 - protein, 9 aa, synthetic construct
PSQGAVKVH

SEQ ID NO: 47656 - protein, 9 aa, synthetic construct
PSQGAVKVF

SEQ ID NO: 47657 - protein, 9 aa, synthetic construct
PSQGALHLY

SEQ ID NO: 47658 - protein, 9 aa, synthetic construct
PSQGALHVR

SEQ ID NO: 47659 - protein, 9 aa, synthetic construct
PSQGALHVF

SEQ ID NO: 47660 - protein, 9 aa, synthetic construct
PSQGALRLY

SEQ ID NO: 47661 - protein, 9 aa, synthetic construct
PSQGALRLR

SEQ ID NO: 47662 - protein, 9 aa, synthetic construct
PSQGALRLH

SEQ ID NO: 47663 - protein, 9 aa, synthetic construct
PSQGALRLK

SEQ ID NO: 47664 - protein, 9 aa, synthetic construct
PSQGALRLF

SEQ ID NO: 47665 - protein, 9 aa, synthetic construct
PSQGALRVY

SEQ ID NO: 47666 - protein, 9 aa, synthetic construct
PSQGALRVR

SEQ ID NO: 47667 - protein, 9 aa, synthetic construct
PSQGALRVH

SEQ ID NO: 47668 - protein, 9 aa, synthetic construct
PSQGALRVF

SEQ ID NO: 47669 - protein, 9 aa, synthetic construct
PSQGALKLY

SEQ ID NO: 47670 - protein, 9 aa, synthetic construct
PSQGALKLR

SEQ ID NO: 47671 - protein, 9 aa, synthetic construct
PSQGALKLH

SEQ ID NO: 47672 - protein, 9 aa, synthetic construct
PSQGALKLK

SEQ ID NO: 47673 - protein, 9 aa, synthetic construct
PSQGALKLF

SEQ ID NO: 47674 - protein, 9 aa, synthetic construct
PSQGALKVR

SEQ ID NO: 47675 - protein, 9 aa, synthetic construct
PSQGALKVK

SEQ ID NO: 47676 - protein, 9 aa, synthetic construct
PSQGAAHLH

SEQ ID NO: 47677 - protein, 9 aa, synthetic construct
PSQGAAHLF

SEQ ID NO: 47678 - protein, 9 aa, synthetic construct
PSQGAAHVR

SEQ ID NO: 47679 - protein, 9 aa, synthetic construct
PSQGAARLR

SEQ ID NO: 47680 - protein, 9 aa, synthetic construct
PSQGAARLH

SEQ ID NO: 47681 - protein, 9 aa, synthetic construct
PSQGAARVY

SEQ ID NO: 47682 - protein, 9 aa, synthetic construct
PSQGAARVR

SEQ ID NO: 47683 - protein, 9 aa, synthetic construct
PSQGAARVK

SEQ ID NO: 47684 - protein, 9 aa, synthetic construct
PSQGAAKLR

SEQ ID NO: 47685 - protein, 9 aa, synthetic construct
PSQGAAKLH

SEQ ID NO: 47686 - protein, 9 aa, synthetic construct
PSQGAAKLK

SEQ ID NO: 47687 - protein, 9 aa, synthetic construct
PSQGAAKVR

SEQ ID NO: 47688 - protein, 9 aa, synthetic construct
PSQGAAKVK

SEQ ID NO: 47689 - protein, 9 aa, synthetic construct
PSQGAIHLY

SEQ ID NO: 47690 - protein, 9 aa, synthetic construct
PSQGAIHLR

SEQ ID NO: 47691 - protein, 9 aa, synthetic construct
PSQGAIHLH

SEQ ID NO: 47692 - protein, 9 aa, synthetic construct
PSQGAIHVY

SEQ ID NO: 47693 - protein, 9 aa, synthetic construct
PSQGAIHVR

SEQ ID NO: 47694 - protein, 9 aa, synthetic construct
PSQGAIRLY

SEQ ID NO: 47695 - protein, 9 aa, synthetic construct
PSQGAIRLR

SEQ ID NO: 47696 - protein, 9 aa, synthetic construct
PSQGAIRLH

SEQ ID NO: 47697 - protein, 9 aa, synthetic construct
PSQGAIRLK

SEQ ID NO: 47698 - protein, 9 aa, synthetic construct
PSQGAIRLF

SEQ ID NO: 47699 - protein, 9 aa, synthetic construct
PSQGAIRVK

SEQ ID NO: 47700 - protein, 9 aa, synthetic construct
PSQGAIRVF

SEQ ID NO: 47701 - protein, 9 aa, synthetic construct
PSQGAIKLR

SEQ ID NO: 47702 - protein, 9 aa, synthetic construct
PSQGAIKLK

SEQ ID NO: 47703 - protein, 9 aa, synthetic construct
PSQGAIKLF

SEQ ID NO: 47704 - protein, 9 aa, synthetic construct
PSQGAIKVR

SEQ ID NO: 47705 - protein, 9 aa, synthetic construct
PSQGAIKVK

SEQ ID NO: 47706 - protein, 9 aa, synthetic construct
PSQGAGHLY

SEQ ID NO: 47707 - protein, 9 aa, synthetic construct
PSQGAGHLR

SEQ ID NO: 47708 - protein, 9 aa, synthetic construct
PSQGAGHLK

SEQ ID NO: 47709 - protein, 9 aa, synthetic construct
PSQGAGHLF

SEQ ID NO: 47710 - protein, 9 aa, synthetic construct
PSQGAGHVY

SEQ ID NO: 47711 - protein, 9 aa, synthetic construct
PSQGAGHVR

SEQ ID NO: 47712 - protein, 9 aa, synthetic construct
PSQGAGRLY

SEQ ID NO: 47713 - protein, 9 aa, synthetic construct
PSQGAGRLR

SEQ ID NO: 47714 - protein, 9 aa, synthetic construct
PSQGAGRLH

SEQ ID NO: 47715 - protein, 9 aa, synthetic construct
PSQGAGRLK

SEQ ID NO: 47716 - protein, 9 aa, synthetic construct
PSQGAGRVR

SEQ ID NO: 47717 - protein, 9 aa, synthetic construct
PSQGAGRVK

SEQ ID NO: 47718 - protein, 9 aa, synthetic construct
PSQGAGKLR

SEQ ID NO: 47719 - protein, 9 aa, synthetic construct
PSQGAGKLH

SEQ ID NO: 47720 - protein, 9 aa, synthetic construct
PSQGAGKLK

SEQ ID NO: 47721 - protein, 9 aa, synthetic construct
PSQGAGKVR

SEQ ID NO: 47722 - protein, 9 aa, synthetic construct
PSQGAGKVK

SEQ ID NO: 47723 - protein, 9 aa, synthetic construct
PSQGAGKVF

SEQ ID NO: 47724 - protein, 9 aa, synthetic construct
PSQGTVHLR

SEQ ID NO: 47725 - protein, 9 aa, synthetic construct
PSQGTVRLR

SEQ ID NO: 47726 - protein, 9 aa, synthetic construct
PSQGTVRLK

SEQ ID NO: 47727 - protein, 9 aa, synthetic construct
PSQGTVRLF

SEQ ID NO: 47728 - protein, 9 aa, synthetic construct
PSQGTVRVR

SEQ ID NO: 47729 - protein, 9 aa, synthetic construct
PSQGTVRVK

SEQ ID NO: 47730 - protein, 9 aa, synthetic construct
PSQGTVKLR

SEQ ID NO: 47731 - protein, 9 aa, synthetic construct
PSQGTVKLK

SEQ ID NO: 47732 - protein, 9 aa, synthetic construct
PSQGTVKVR

SEQ ID NO: 47733 - protein, 9 aa, synthetic construct
PSQGTVKVH

SEQ ID NO: 47734 - protein, 9 aa, synthetic construct
PSQGTLHLY

SEQ ID NO: 47735 - protein, 9 aa, synthetic construct
PSQGTLHLK

SEQ ID NO: 47736 - protein, 9 aa, synthetic construct
PSQGTLHLF

SEQ ID NO: 47737 - protein, 9 aa, synthetic construct
PSQGTLRLY

SEQ ID NO: 47738 - protein, 9 aa, synthetic construct
PSQGTLRLR

SEQ ID NO: 47739 - protein, 9 aa, synthetic construct
PSQGTLRLH

SEQ ID NO: 47740 - protein, 9 aa, synthetic construct
PSQGTLRLK

SEQ ID NO: 47741 - protein, 9 aa, synthetic construct
PSQGTLRLF

SEQ ID NO: 47742 - protein, 9 aa, synthetic construct
PSQGTLRVH

SEQ ID NO: 47743 - protein, 9 aa, synthetic construct
PSQGTLRVK

SEQ ID NO: 47744 - protein, 9 aa, synthetic construct
PSQGTLRVF

SEQ ID NO: 47745 - protein, 9 aa, synthetic construct
PSQGTLKLY

SEQ ID NO: 47746 - protein, 9 aa, synthetic construct
PSQGTLKLR

SEQ ID NO: 47747 - protein, 9 aa, synthetic construct
PSQGTLKLK

SEQ ID NO: 47748 - protein, 9 aa, synthetic construct
PSQGTLKVY

SEQ ID NO: 47749 - protein, 9 aa, synthetic construct
PSQGTLKVK

SEQ ID NO: 47750 - protein, 9 aa, synthetic construct
PSQGTARLR

SEQ ID NO: 47751 - protein, 9 aa, synthetic construct
PSQGTARLK

SEQ ID NO: 47752 - protein, 9 aa, synthetic construct
PSQGTARVY

SEQ ID NO: 47753 - protein, 9 aa, synthetic construct
PSQGTARVR

SEQ ID NO: 47754 - protein, 9 aa, synthetic construct
PSQGTARVK

SEQ ID NO: 47755 - protein, 9 aa, synthetic construct
PSQGTAKLR

SEQ ID NO: 47756 - protein, 9 aa, synthetic construct
PSQGTAKLK

SEQ ID NO: 47757 - protein, 9 aa, synthetic construct
PSQGTAKVR

SEQ ID NO: 47758 - protein, 9 aa, synthetic construct
PSQGTAKVK

SEQ ID NO: 47759 - protein, 9 aa, synthetic construct
PSQGTIRLR

SEQ ID NO: 47760 - protein, 9 aa, synthetic construct
PSQGTIRLK

SEQ ID NO: 47761 - protein, 9 aa, synthetic construct
PSQGTIRVK

SEQ ID NO: 47762 - protein, 9 aa, synthetic construct
PSQGTIKLR

SEQ ID NO: 47763 - protein, 9 aa, synthetic construct
PSQGTIKLK

SEQ ID NO: 47764 - protein, 9 aa, synthetic construct
PSQGTIKVR

SEQ ID NO: 47765 - protein, 9 aa, synthetic construct
PSQGTGHVY

SEQ ID NO: 47766 - protein, 9 aa, synthetic construct
PSQGTGRLR

SEQ ID NO: 47767 - protein, 9 aa, synthetic construct
PSQGTGRVR

SEQ ID NO: 47768 - protein, 9 aa, synthetic construct
PSQGTGRVH

SEQ ID NO: 47769 - protein, 9 aa, synthetic construct
PSQGTGRVK

SEQ ID NO: 47770 - protein, 9 aa, synthetic construct
PSQGTGKLR

SEQ ID NO: 47771 - protein, 9 aa, synthetic construct
PSQGTGKLK

SEQ ID NO: 47772 - protein, 9 aa, synthetic construct
PSQGTGKVH

SEQ ID NO: 47773 - protein, 9 aa, synthetic construct
PSQGTGKVK

SEQ ID NO: 47774 - protein, 9 aa, synthetic construct
PSQGSVHLY

SEQ ID NO: 47775 - protein, 9 aa, synthetic construct
PSQGSVHLH

SEQ ID NO: 47776 - protein, 9 aa, synthetic construct
PSQGSVHVH

SEQ ID NO: 47777 - protein, 9 aa, synthetic construct
PSQGSVHVK

SEQ ID NO: 47778 - protein, 9 aa, synthetic construct
PSQGSVHVF

SEQ ID NO: 47779 - protein, 9 aa, synthetic construct
PSQGSVRLY

SEQ ID NO: 47780 - protein, 9 aa, synthetic construct
PSQGSVRLR

SEQ ID NO: 47781 - protein, 9 aa, synthetic construct
PSQGSVRLK

SEQ ID NO: 47782 - protein, 9 aa, synthetic construct
PSQGSVRVR

SEQ ID NO: 47783 - protein, 9 aa, synthetic construct
PSQGSVRVH

SEQ ID NO: 47784 - protein, 9 aa, synthetic construct
PSQGSVRVK

SEQ ID NO: 47785 - protein, 9 aa, synthetic construct
PSQGSVKLR

SEQ ID NO: 47786 - protein, 9 aa, synthetic construct
PSQGSVKLH

SEQ ID NO: 47787 - protein, 9 aa, synthetic construct
PSQGSVKLK

SEQ ID NO: 47788 - protein, 9 aa, synthetic construct
PSQGSLHLY

SEQ ID NO: 47789 - protein, 9 aa, synthetic construct
PSQGSLHLR

SEQ ID NO: 47790 - protein, 9 aa, synthetic construct
PSQGSLHVR

SEQ ID NO: 47791 - protein, 9 aa, synthetic construct
PSQGSLHVK

SEQ ID NO: 47792 - protein, 9 aa, synthetic construct
PSQGSLHVF

SEQ ID NO: 47793 - protein, 9 aa, synthetic construct
PSQGSLRLY

SEQ ID NO: 47794 - protein, 9 aa, synthetic construct
PSQGSLRLR

SEQ ID NO: 47795 - protein, 9 aa, synthetic construct
PSQGSLRLK

SEQ ID NO: 47796 - protein, 9 aa, synthetic construct
PSQGSLRLF

SEQ ID NO: 47797 - protein, 9 aa, synthetic construct
PSQGSLRVY

SEQ ID NO: 47798 - protein, 9 aa, synthetic construct
PSQGSLRVR

SEQ ID NO: 47799 - protein, 9 aa, synthetic construct
PSQGSLRVH

SEQ ID NO: 47800 - protein, 9 aa, synthetic construct
PSQGSLRVK

SEQ ID NO: 47801 - protein, 9 aa, synthetic construct
PSQGSLRVF

SEQ ID NO: 47802 - protein, 9 aa, synthetic construct
PSQGSLKLR

SEQ ID NO: 47803 - protein, 9 aa, synthetic construct
PSQGSLKLH

SEQ ID NO: 47804 - protein, 9 aa, synthetic construct
PSQGSLKLK

SEQ ID NO: 47805 - protein, 9 aa, synthetic construct
PSQGSLKLF

SEQ ID NO: 47806 - protein, 9 aa, synthetic construct
PSQGSLKVY

SEQ ID NO: 47807 - protein, 9 aa, synthetic construct
PSQGSLKVR

SEQ ID NO: 47808 - protein, 9 aa, synthetic construct
PSQGSLKVK

SEQ ID NO: 47809 - protein, 9 aa, synthetic construct
PSQGSAHLH

SEQ ID NO: 47810 - protein, 9 aa, synthetic construct
PSQGSAHLK

SEQ ID NO: 47811 - protein, 9 aa, synthetic construct
PSQGSAHVH

SEQ ID NO: 47812 - protein, 9 aa, synthetic construct
PSQGSARLR

SEQ ID NO: 47813 - protein, 9 aa, synthetic construct
PSQGSARLH

SEQ ID NO: 47814 - protein, 9 aa, synthetic construct
PSQGSARLK

SEQ ID NO: 47815 - protein, 9 aa, synthetic construct
PSQGSARLF

SEQ ID NO: 47816 - protein, 9 aa, synthetic construct
PSQGSARVY

SEQ ID NO: 47817 - protein, 9 aa, synthetic construct
PSQGSARVR

SEQ ID NO: 47818 - protein, 9 aa, synthetic construct
PSQGSARVH

SEQ ID NO: 47819 - protein, 9 aa, synthetic construct
PSQGSARVK

SEQ ID NO: 47820 - protein, 9 aa, synthetic construct
PSQGSAKLY

SEQ ID NO: 47821 - protein, 9 aa, synthetic construct
PSQGSAKLR

SEQ ID NO: 47822 - protein, 9 aa, synthetic construct
PSQGSAKLH

SEQ ID NO: 47823 - protein, 9 aa, synthetic construct
PSQGSAKLK

SEQ ID NO: 47824 - protein, 9 aa, synthetic construct
PSQGSAKVY

SEQ ID NO: 47825 - protein, 9 aa, synthetic construct
PSQGSAKVR

SEQ ID NO: 47826 - protein, 9 aa, synthetic construct
PSQGSAKVH

SEQ ID NO: 47827 - protein, 9 aa, synthetic construct
PSQGSAKVK

SEQ ID NO: 47828 - protein, 9 aa, synthetic construct
PSQGSIHLF

SEQ ID NO: 47829 - protein, 9 aa, synthetic construct
PSQGSIRLR

SEQ ID NO: 47830 - protein, 9 aa, synthetic construct
PSQGSIRLH

SEQ ID NO: 47831 - protein, 9 aa, synthetic construct
PSQGSIRLK

SEQ ID NO: 47832 - protein, 9 aa, synthetic construct
PSQGSIRVR

SEQ ID NO: 47833 - protein, 9 aa, synthetic construct
PSQGSIRVH

SEQ ID NO: 47834 - protein, 9 aa, synthetic construct
PSQGSIRVK

SEQ ID NO: 47835 - protein, 9 aa, synthetic construct
PSQGSIRVF

SEQ ID NO: 47836 - protein, 9 aa, synthetic construct
PSQGSIKLR

SEQ ID NO: 47837 - protein, 9 aa, synthetic construct
PSQGSIKLH

SEQ ID NO: 47838 - protein, 9 aa, synthetic construct
PSQGSIKLK

SEQ ID NO: 47839 - protein, 9 aa, synthetic construct
PSQGSIKVR

SEQ ID NO: 47840 - protein, 9 aa, synthetic construct
PSQGSIKVH

SEQ ID NO: 47841 - protein, 9 aa, synthetic construct
PSQGSIKVK

SEQ ID NO: 47842 - protein, 9 aa, synthetic construct
PSQGSGHLR

SEQ ID NO: 47843 - protein, 9 aa, synthetic construct
PSQGSGHLK

SEQ ID NO: 47844 - protein, 9 aa, synthetic construct
PSQGSGHVR

SEQ ID NO: 47845 - protein, 9 aa, synthetic construct
PSQGSGHVK

SEQ ID NO: 47846 - protein, 9 aa, synthetic construct
PSQGSGHVF

SEQ ID NO: 47847 - protein, 9 aa, synthetic construct
PSQGSGRLR

SEQ ID NO: 47848 - protein, 9 aa, synthetic construct
PSQGSGRLH

SEQ ID NO: 47849 - protein, 9 aa, synthetic construct
PSQGSGRLK

SEQ ID NO: 47850 - protein, 9 aa, synthetic construct
PSQGSGRVR

SEQ ID NO: 47851 - protein, 9 aa, synthetic construct
PSQGSGRVK

SEQ ID NO: 47852 - protein, 9 aa, synthetic construct
PSQGSGKLY

SEQ ID NO: 47853 - protein, 9 aa, synthetic construct
PSQGSGKLR

SEQ ID NO: 47854 - protein, 9 aa, synthetic construct
PSQGSGKLH

SEQ ID NO: 47855 - protein, 9 aa, synthetic construct
PSQGSGKLK

SEQ ID NO: 47856 - protein, 9 aa, synthetic construct
PSQGSGKVR

SEQ ID NO: 47857 - protein, 9 aa, synthetic construct
PSQGSGKVH

SEQ ID NO: 47858 - protein, 9 aa, synthetic construct
PSQGSGKVF

SEQ ID NO: 47859 - protein, 9 aa, synthetic construct
PSQGVVHLK

SEQ ID NO: 47860 - protein, 9 aa, synthetic construct
PSQGVVRLY

SEQ ID NO: 47861 - protein, 9 aa, synthetic construct
PSQGVVRLR

SEQ ID NO: 47862 - protein, 9 aa, synthetic construct
PSQGVVRLH

SEQ ID NO: 47863 - protein, 9 aa, synthetic construct
PSQGVVRLK

SEQ ID NO: 47864 - protein, 9 aa, synthetic construct
PSQGVVRLF

SEQ ID NO: 47865 - protein, 9 aa, synthetic construct
PSQGVVRVY

SEQ ID NO: 47866 - protein, 9 aa, synthetic construct
PSQGVVRVR

SEQ ID NO: 47867 - protein, 9 aa, synthetic construct
PSQGVVRVK

SEQ ID NO: 47868 - protein, 9 aa, synthetic construct
PSQGVVKLR

SEQ ID NO: 47869 - protein, 9 aa, synthetic construct
PSQGVVKVR

SEQ ID NO: 47870 - protein, 9 aa, synthetic construct
PSQGVLHLY

SEQ ID NO: 47871 - protein, 9 aa, synthetic construct
PSQGVLHLR

SEQ ID NO: 47872 - protein, 9 aa, synthetic construct
PSQGVLHLF

SEQ ID NO: 47873 - protein, 9 aa, synthetic construct
PSQGVLRLY

SEQ ID NO: 47874 - protein, 9 aa, synthetic construct
PSQGVLRLR

SEQ ID NO: 47875 - protein, 9 aa, synthetic construct
PSQGVLRLH

SEQ ID NO: 47876 - protein, 9 aa, synthetic construct
PSQGVLRLK

SEQ ID NO: 47877 - protein, 9 aa, synthetic construct
PSQGVLRVY

SEQ ID NO: 47878 - protein, 9 aa, synthetic construct
PSQGVLRVR

SEQ ID NO: 47879 - protein, 9 aa, synthetic construct
PSQGVLRVH

SEQ ID NO: 47880 - protein, 9 aa, synthetic construct
PSQGVLRVK

SEQ ID NO: 47881 - protein, 9 aa, synthetic construct
PSQGVLKLY

SEQ ID NO: 47882 - protein, 9 aa, synthetic construct
PSQGVLKLH

SEQ ID NO: 47883 - protein, 9 aa, synthetic construct
PSQGVLKLK

SEQ ID NO: 47884 - protein, 9 aa, synthetic construct
PSQGVLKVY

SEQ ID NO: 47885 - protein, 9 aa, synthetic construct
PSQGVLKVR

SEQ ID NO: 47886 - protein, 9 aa, synthetic construct
PSQGVLKVH

SEQ ID NO: 47887 - protein, 9 aa, synthetic construct
PSQGVLKVK

SEQ ID NO: 47888 - protein, 9 aa, synthetic construct
PSQGVLKVF

SEQ ID NO: 47889 - protein, 9 aa, synthetic construct
PSQGVAHVR

SEQ ID NO: 47890 - protein, 9 aa, synthetic construct
PSQGVARLY

SEQ ID NO: 47891 - protein, 9 aa, synthetic construct
PSQGVARLR

SEQ ID NO: 47892 - protein, 9 aa, synthetic construct
PSQGVARLK

SEQ ID NO: 47893 - protein, 9 aa, synthetic construct
PSQGVARLF

SEQ ID NO: 47894 - protein, 9 aa, synthetic construct
PSQGVARVY

SEQ ID NO: 47895 - protein, 9 aa, synthetic construct
PSQGVARVR

SEQ ID NO: 47896 - protein, 9 aa, synthetic construct
PSQGVARVH

SEQ ID NO: 47897 - protein, 9 aa, synthetic construct
PSQGVARVK

SEQ ID NO: 47898 - protein, 9 aa, synthetic construct
PSQGVARVF

SEQ ID NO: 47899 - protein, 9 aa, synthetic construct
PSQGVAKLY

SEQ ID NO: 47900 - protein, 9 aa, synthetic construct
PSQGVAKLR

SEQ ID NO: 47901 - protein, 9 aa, synthetic construct
PSQGVAKLK

SEQ ID NO: 47902 - protein, 9 aa, synthetic construct
PSQGVAKLF

SEQ ID NO: 47903 - protein, 9 aa, synthetic construct
PSQGVAKVY

SEQ ID NO: 47904 - protein, 9 aa, synthetic construct
PSQGVAKVR

SEQ ID NO: 47905 - protein, 9 aa, synthetic construct
PSQGVAKVK

SEQ ID NO: 47906 - protein, 9 aa, synthetic construct
PSQGVAKVF

SEQ ID NO: 47907 - protein, 9 aa, synthetic construct
PSQGVIHLY

SEQ ID NO: 47908 - protein, 9 aa, synthetic construct
PSQGVIHLK

SEQ ID NO: 47909 - protein, 9 aa, synthetic construct
PSQGVIHVF

SEQ ID NO: 47910 - protein, 9 aa, synthetic construct
PSQGVIRLR

SEQ ID NO: 47911 - protein, 9 aa, synthetic construct
PSQGVIRVY

SEQ ID NO: 47912 - protein, 9 aa, synthetic construct
PSQGVIRVR

SEQ ID NO: 47913 - protein, 9 aa, synthetic construct
PSQGVIRVK

SEQ ID NO: 47914 - protein, 9 aa, synthetic construct
PSQGVIRVF

SEQ ID NO: 47915 - protein, 9 aa, synthetic construct
PSQGVIKLR

SEQ ID NO: 47916 - protein, 9 aa, synthetic construct
PSQGVIKVY

SEQ ID NO: 47917 - protein, 9 aa, synthetic construct
PSQGVIKVR

SEQ ID NO: 47918 - protein, 9 aa, synthetic construct
PSQGVIKVK

SEQ ID NO: 47919 - protein, 9 aa, synthetic construct
PSQGVGHLY

SEQ ID NO: 47920 - protein, 9 aa, synthetic construct
PSQGVGHLF

SEQ ID NO: 47921 - protein, 9 aa, synthetic construct
PSQGVGHVK

SEQ ID NO: 47922 - protein, 9 aa, synthetic construct
PSQGVGRLR

SEQ ID NO: 47923 - protein, 9 aa, synthetic construct
PSQGVGRLH

SEQ ID NO: 47924 - protein, 9 aa, synthetic construct
PSQGVGRLK

SEQ ID NO: 47925 - protein, 9 aa, synthetic construct
PSQGVGRLF

SEQ ID NO: 47926 - protein, 9 aa, synthetic construct
PSQGVGRVY

SEQ ID NO: 47927 - protein, 9 aa, synthetic construct
PSQGVGRVR

SEQ ID NO: 47928 - protein, 9 aa, synthetic construct
PSQGVGKVR

SEQ ID NO: 47929 - protein, 9 aa, synthetic construct
PSQGVGKVK

SEQ ID NO: 47930 - protein, 9 aa, synthetic construct
PSQGGVHLY

SEQ ID NO: 47931 - protein, 9 aa, synthetic construct
PSQGGVHLR

SEQ ID NO: 47932 - protein, 9 aa, synthetic construct
PSQGGVHLK

SEQ ID NO: 47933 - protein, 9 aa, synthetic construct
PSQGGVHVH

SEQ ID NO: 47934 - protein, 9 aa, synthetic construct
PSQGGVRLY

SEQ ID NO: 47935 - protein, 9 aa, synthetic construct
PSQGGVRLR

SEQ ID NO: 47936 - protein, 9 aa, synthetic construct
PSQGGVRLK

SEQ ID NO: 47937 - protein, 9 aa, synthetic construct
PSQGGVRLF

SEQ ID NO: 47938 - protein, 9 aa, synthetic construct
PSQGGVRVR

SEQ ID NO: 47939 - protein, 9 aa, synthetic construct
PSQGGVRVK

SEQ ID NO: 47940 - protein, 9 aa, synthetic construct
PSQGGVKLR

SEQ ID NO: 47941 - protein, 9 aa, synthetic construct
PSQGGVKLK

SEQ ID NO: 47942 - protein, 9 aa, synthetic construct
PSQGGVKVR

SEQ ID NO: 47943 - protein, 9 aa, synthetic construct
PSQGGVKVK

SEQ ID NO: 47944 - protein, 9 aa, synthetic construct
PSQGGLHLY

SEQ ID NO: 47945 - protein, 9 aa, synthetic construct
PSQGGLHVY

SEQ ID NO: 47946 - protein, 9 aa, synthetic construct
PSQGGLHVR

SEQ ID NO: 47947 - protein, 9 aa, synthetic construct
PSQGGLHVF

SEQ ID NO: 47948 - protein, 9 aa, synthetic construct
PSQGGLRLY

SEQ ID NO: 47949 - protein, 9 aa, synthetic construct
PSQGGLRLR

SEQ ID NO: 47950 - protein, 9 aa, synthetic construct
PSQGGLRLH

SEQ ID NO: 47951 - protein, 9 aa, synthetic construct
PSQGGLRLK

SEQ ID NO: 47952 - protein, 9 aa, synthetic construct
PSQGGLRLF

SEQ ID NO: 47953 - protein, 9 aa, synthetic construct
PSQGGLRVY

SEQ ID NO: 47954 - protein, 9 aa, synthetic construct
PSQGGLRVR

SEQ ID NO: 47955 - protein, 9 aa, synthetic construct
PSQGGLRVH

SEQ ID NO: 47956 - protein, 9 aa, synthetic construct
PSQGGLRVK

SEQ ID NO: 47957 - protein, 9 aa, synthetic construct
PSQGGLRVF

SEQ ID NO: 47958 - protein, 9 aa, synthetic construct
PSQGGLKLY

SEQ ID NO: 47959 - protein, 9 aa, synthetic construct
PSQGGLKLR

SEQ ID NO: 47960 - protein, 9 aa, synthetic construct
PSQGGLKLK

SEQ ID NO: 47961 - protein, 9 aa, synthetic construct
PSQGGLKLF

SEQ ID NO: 47962 - protein, 9 aa, synthetic construct
PSQGGLKVY

SEQ ID NO: 47963 - protein, 9 aa, synthetic construct
PSQGGLKVR

SEQ ID NO: 47964 - protein, 9 aa, synthetic construct
PSQGGLKVH

SEQ ID NO: 47965 - protein, 9 aa, synthetic construct
PSQGGLKVK

SEQ ID NO: 47966 - protein, 9 aa, synthetic construct
PSQGGAHLR

SEQ ID NO: 47967 - protein, 9 aa, synthetic construct
PSQGGAHLK

SEQ ID NO: 47968 - protein, 9 aa, synthetic construct
PSQGGAHVY

SEQ ID NO: 47969 - protein, 9 aa, synthetic construct
PSQGGARLY

SEQ ID NO: 47970 - protein, 9 aa, synthetic construct
PSQGGARLR

SEQ ID NO: 47971 - protein, 9 aa, synthetic construct
PSQGGARLH

SEQ ID NO: 47972 - protein, 9 aa, synthetic construct
PSQGGARLK

SEQ ID NO: 47973 - protein, 9 aa, synthetic construct
PSQGGARLF

SEQ ID NO: 47974 - protein, 9 aa, synthetic construct
PSQGGARVY

SEQ ID NO: 47975 - protein, 9 aa, synthetic construct
PSQGGARVR

SEQ ID NO: 47976 - protein, 9 aa, synthetic construct
PSQGGARVH

SEQ ID NO: 47977 - protein, 9 aa, synthetic construct
PSQGGARVK

SEQ ID NO: 47978 - protein, 9 aa, synthetic construct
PSQGGAKLR

SEQ ID NO: 47979 - protein, 9 aa, synthetic construct
PSQGGAKLK

SEQ ID NO: 47980 - protein, 9 aa, synthetic construct
PSQGGAKVY

SEQ ID NO: 47981 - protein, 9 aa, synthetic construct
PSQGGAKVR

SEQ ID NO: 47982 - protein, 9 aa, synthetic construct
PSQGGAKVK

SEQ ID NO: 47983 - protein, 9 aa, synthetic construct
PSQGGAKVF

SEQ ID NO: 47984 - protein, 9 aa, synthetic construct
PSQGGIHLR

SEQ ID NO: 47985 - protein, 9 aa, synthetic construct
PSQGGIRLH

SEQ ID NO: 47986 - protein, 9 aa, synthetic construct
PSQGGIRLK

SEQ ID NO: 47987 - protein, 9 aa, synthetic construct
PSQGGIRVR

SEQ ID NO: 47988 - protein, 9 aa, synthetic construct
PSQGGIRVK

SEQ ID NO: 47989 - protein, 9 aa, synthetic construct
PSQGGIRVF

SEQ ID NO: 47990 - protein, 9 aa, synthetic construct
PSQGGIKLR

SEQ ID NO: 47991 - protein, 9 aa, synthetic construct
PSQGGIKLK

SEQ ID NO: 47992 - protein, 9 aa, synthetic construct
PSQGGIKVR

SEQ ID NO: 47993 - protein, 9 aa, synthetic construct
PSQGGIKVK

SEQ ID NO: 47994 - protein, 9 aa, synthetic construct
PSQGGGHLR

SEQ ID NO: 47995 - protein, 9 aa, synthetic construct
PSQGGGHLK

SEQ ID NO: 47996 - protein, 9 aa, synthetic construct
PSQGGGHVY

SEQ ID NO: 47997 - protein, 9 aa, synthetic construct
PSQGGGHVR

SEQ ID NO: 47998 - protein, 9 aa, synthetic construct
PSQGGGHVK

SEQ ID NO: 47999 - protein, 9 aa, synthetic construct
PSQGGGRLR

SEQ ID NO: 48000 - protein, 9 aa, synthetic construct
PSQGGGRLH

SEQ ID NO: 48001 - protein, 9 aa, synthetic construct
PSQGGGRLK

SEQ ID NO: 48002 - protein, 9 aa, synthetic construct
PSQGGGKLR

SEQ ID NO: 48003 - protein, 9 aa, synthetic construct
PSQGGGKLH

SEQ ID NO: 48004 - protein, 9 aa, synthetic construct
PSQGGGKLK

SEQ ID NO: 48005 - protein, 9 aa, synthetic construct
PSQGGGKVR

SEQ ID NO: 48006 - protein, 9 aa, synthetic construct
PSQGGGKVK

SEQ ID NO: 48007 - protein, 9 aa, synthetic construct
PSQAAVHLH

SEQ ID NO: 48008 - protein, 9 aa, synthetic construct
PSQAAVHLK

SEQ ID NO: 48009 - protein, 9 aa, synthetic construct
PSQAAVHLF

SEQ ID NO: 48010 - protein, 9 aa, synthetic construct
PSQAAVRLR

SEQ ID NO: 48011 - protein, 9 aa, synthetic construct
PSQAAVRLK

SEQ ID NO: 48012 - protein, 9 aa, synthetic construct
PSQAAVRVY

SEQ ID NO: 48013 - protein, 9 aa, synthetic construct
PSQAAVRVR

SEQ ID NO: 48014 - protein, 9 aa, synthetic construct
PSQAAVRVH

SEQ ID NO: 48015 - protein, 9 aa, synthetic construct
PSQAAVKVR

SEQ ID NO: 48016 - protein, 9 aa, synthetic construct
PSQAAVKVK

SEQ ID NO: 48017 - protein, 9 aa, synthetic construct
PSQAALHLF

SEQ ID NO: 48018 - protein, 9 aa, synthetic construct
PSQAALHVF

SEQ ID NO: 48019 - protein, 9 aa, synthetic construct
PSQAALRLY

SEQ ID NO: 48020 - protein, 9 aa, synthetic construct
PSQAALRLR

SEQ ID NO: 48021 - protein, 9 aa, synthetic construct
PSQAALRLK

SEQ ID NO: 48022 - protein, 9 aa, synthetic construct
PSQAALRLF

SEQ ID NO: 48023 - protein, 9 aa, synthetic construct
PSQAALRVY

SEQ ID NO: 48024 - protein, 9 aa, synthetic construct
PSQAALRVR

SEQ ID NO: 48025 - protein, 9 aa, synthetic construct
PSQAALRVH

SEQ ID NO: 48026 - protein, 9 aa, synthetic construct
PSQAALKLY

SEQ ID NO: 48027 - protein, 9 aa, synthetic construct
PSQAALKLK

SEQ ID NO: 48028 - protein, 9 aa, synthetic construct
PSQAALKLF

SEQ ID NO: 48029 - protein, 9 aa, synthetic construct
PSQAALKVR

SEQ ID NO: 48030 - protein, 9 aa, synthetic construct
PSQAALKVH

SEQ ID NO: 48031 - protein, 9 aa, synthetic construct
PSQAALKVK

SEQ ID NO: 48032 - protein, 9 aa, synthetic construct
PSQAAAHLR

SEQ ID NO: 48033 - protein, 9 aa, synthetic construct
PSQAAARLY

SEQ ID NO: 48034 - protein, 9 aa, synthetic construct
PSQAAARLR

SEQ ID NO: 48035 - protein, 9 aa, synthetic construct
PSQAAARLK

SEQ ID NO: 48036 - protein, 9 aa, synthetic construct
PSQAAARVR

SEQ ID NO: 48037 - protein, 9 aa, synthetic construct
PSQAAARVK

SEQ ID NO: 48038 - protein, 9 aa, synthetic construct
PSQAAAKLR

SEQ ID NO: 48039 - protein, 9 aa, synthetic construct
PSQAAAKLK

SEQ ID NO: 48040 - protein, 9 aa, synthetic construct
PSQAAAKLF

SEQ ID NO: 48041 - protein, 9 aa, synthetic construct
PSQAAAKVR

SEQ ID NO: 48042 - protein, 9 aa, synthetic construct
PSQAAIHVY

SEQ ID NO: 48043 - protein, 9 aa, synthetic construct
PSQAAIHVF

SEQ ID NO: 48044 - protein, 9 aa, synthetic construct
PSQAAIRVK

SEQ ID NO: 48045 - protein, 9 aa, synthetic construct
PSQAAIKLR

SEQ ID NO: 48046 - protein, 9 aa, synthetic construct
PSQAAGHVY

SEQ ID NO: 48047 - protein, 9 aa, synthetic construct
PSQAAGHVH

SEQ ID NO: 48048 - protein, 9 aa, synthetic construct
PSQAAGHVF

SEQ ID NO: 48049 - protein, 9 aa, synthetic construct
PSQAAGRLR

SEQ ID NO: 48050 - protein, 9 aa, synthetic construct
PSQAAGRLK

SEQ ID NO: 48051 - protein, 9 aa, synthetic construct
PSQAAGRVY

SEQ ID NO: 48052 - protein, 9 aa, synthetic construct
PSQAAGRVR

SEQ ID NO: 48053 - protein, 9 aa, synthetic construct
PSQAAGRVH

SEQ ID NO: 48054 - protein, 9 aa, synthetic construct
PSQAAGRVK

SEQ ID NO: 48055 - protein, 9 aa, synthetic construct
PSQAAGKLR

SEQ ID NO: 48056 - protein, 9 aa, synthetic construct
PSQAAGKLK

SEQ ID NO: 48057 - protein, 9 aa, synthetic construct
PSQAAGKVR

SEQ ID NO: 48058 - protein, 9 aa, synthetic construct
PSQAAGKVK

SEQ ID NO: 48059 - protein, 9 aa, synthetic construct
PSQATVHLY

SEQ ID NO: 48060 - protein, 9 aa, synthetic construct
PSQATVHVR

SEQ ID NO: 48061 - protein, 9 aa, synthetic construct
PSQATVHVH

SEQ ID NO: 48062 - protein, 9 aa, synthetic construct
PSQATVRLR

SEQ ID NO: 48063 - protein, 9 aa, synthetic construct
PSQATVRLK

SEQ ID NO: 48064 - protein, 9 aa, synthetic construct
PSQATVRLF

SEQ ID NO: 48065 - protein, 9 aa, synthetic construct
PSQATVRVR

SEQ ID NO: 48066 - protein, 9 aa, synthetic construct
PSQATVRVH

SEQ ID NO: 48067 - protein, 9 aa, synthetic construct
PSQATVRVK

SEQ ID NO: 48068 - protein, 9 aa, synthetic construct
PSQATVKLR

SEQ ID NO: 48069 - protein, 9 aa, synthetic construct
PSQATVKLK

SEQ ID NO: 48070 - protein, 9 aa, synthetic construct
PSQATVKVR

SEQ ID NO: 48071 - protein, 9 aa, synthetic construct
PSQATVKVK

SEQ ID NO: 48072 - protein, 9 aa, synthetic construct
PSQATLHLY

SEQ ID NO: 48073 - protein, 9 aa, synthetic construct
PSQATLHLR

SEQ ID NO: 48074 - protein, 9 aa, synthetic construct
PSQATLHLH

SEQ ID NO: 48075 - protein, 9 aa, synthetic construct
PSQATLRLY

SEQ ID NO: 48076 - protein, 9 aa, synthetic construct
PSQATLRLR

SEQ ID NO: 48077 - protein, 9 aa, synthetic construct
PSQATLRLK

SEQ ID NO: 48078 - protein, 9 aa, synthetic construct
PSQATLRVY

SEQ ID NO: 48079 - protein, 9 aa, synthetic construct
PSQATLRVR

SEQ ID NO: 48080 - protein, 9 aa, synthetic construct
PSQATLRVH

SEQ ID NO: 48081 - protein, 9 aa, synthetic construct
PSQATLRVK

SEQ ID NO: 48082 - protein, 9 aa, synthetic construct
PSQATLKLK

SEQ ID NO: 48083 - protein, 9 aa, synthetic construct
PSQATLKVY

SEQ ID NO: 48084 - protein, 9 aa, synthetic construct
PSQATLKVR

SEQ ID NO: 48085 - protein, 9 aa, synthetic construct
PSQATLKVK

SEQ ID NO: 48086 - protein, 9 aa, synthetic construct
PSQATARLR

SEQ ID NO: 48087 - protein, 9 aa, synthetic construct
PSQATARLH

SEQ ID NO: 48088 - protein, 9 aa, synthetic construct
PSQATARVR

SEQ ID NO: 48089 - protein, 9 aa, synthetic construct
PSQATARVK

SEQ ID NO: 48090 - protein, 9 aa, synthetic construct
PSQATAKLK

SEQ ID NO: 48091 - protein, 9 aa, synthetic construct
PSQATAKVR

SEQ ID NO: 48092 - protein, 9 aa, synthetic construct
PSQATIHLR

SEQ ID NO: 48093 - protein, 9 aa, synthetic construct
PSQATIHVF

SEQ ID NO: 48094 - protein, 9 aa, synthetic construct
PSQATIRLK

SEQ ID NO: 48095 - protein, 9 aa, synthetic construct
PSQATIRVR

SEQ ID NO: 48096 - protein, 9 aa, synthetic construct
PSQATIRVK

SEQ ID NO: 48097 - protein, 9 aa, synthetic construct
PSQATIRVF

SEQ ID NO: 48098 - protein, 9 aa, synthetic construct
PSQATIKLK

SEQ ID NO: 48099 - protein, 9 aa, synthetic construct
PSQATIKVK

SEQ ID NO: 48100 - protein, 9 aa, synthetic construct
PSQATGRLR

SEQ ID NO: 48101 - protein, 9 aa, synthetic construct
PSQATGRVR

SEQ ID NO: 48102 - protein, 9 aa, synthetic construct
PSQATGKLK

SEQ ID NO: 48103 - protein, 9 aa, synthetic construct
PSQATGKVK

SEQ ID NO: 48104 - protein, 9 aa, synthetic construct
PSQASVHLY

SEQ ID NO: 48105 - protein, 9 aa, synthetic construct
PSQASVHLH

SEQ ID NO: 48106 - protein, 9 aa, synthetic construct
PSQASVHLF

SEQ ID NO: 48107 - protein, 9 aa, synthetic construct
PSQASVHVH

SEQ ID NO: 48108 - protein, 9 aa, synthetic construct
PSQASVRLR

SEQ ID NO: 48109 - protein, 9 aa, synthetic construct
PSQASVRLH

SEQ ID NO: 48110 - protein, 9 aa, synthetic construct
PSQASVRLK

SEQ ID NO: 48111 - protein, 9 aa, synthetic construct
PSQASVRLF

SEQ ID NO: 48112 - protein, 9 aa, synthetic construct
PSQASVRVR

SEQ ID NO: 48113 - protein, 9 aa, synthetic construct
PSQASVRVH

SEQ ID NO: 48114 - protein, 9 aa, synthetic construct
PSQASVRVK

SEQ ID NO: 48115 - protein, 9 aa, synthetic construct
PSQASVKLR

SEQ ID NO: 48116 - protein, 9 aa, synthetic construct
PSQASVKLK

SEQ ID NO: 48117 - protein, 9 aa, synthetic construct
PSQASVKVK

SEQ ID NO: 48118 - protein, 9 aa, synthetic construct
PSQASLHLY

SEQ ID NO: 48119 - protein, 9 aa, synthetic construct
PSQASLHLR

SEQ ID NO: 48120 - protein, 9 aa, synthetic construct
PSQASLHVH

SEQ ID NO: 48121 - protein, 9 aa, synthetic construct
PSQASLHVK

SEQ ID NO: 48122 - protein, 9 aa, synthetic construct
PSQASLRLY

SEQ ID NO: 48123 - protein, 9 aa, synthetic construct
PSQASLRLR

SEQ ID NO: 48124 - protein, 9 aa, synthetic construct
PSQASLRLH

SEQ ID NO: 48125 - protein, 9 aa, synthetic construct
PSQASLRLK

SEQ ID NO: 48126 - protein, 9 aa, synthetic construct
PSQASLRLF

SEQ ID NO: 48127 - protein, 9 aa, synthetic construct
PSQASLRVY

SEQ ID NO: 48128 - protein, 9 aa, synthetic construct
PSQASLRVR

SEQ ID NO: 48129 - protein, 9 aa, synthetic construct
PSQASLRVH

SEQ ID NO: 48130 - protein, 9 aa, synthetic construct
PSQASLRVK

SEQ ID NO: 48131 - protein, 9 aa, synthetic construct
PSQASLRVF

SEQ ID NO: 48132 - protein, 9 aa, synthetic construct
PSQASLKLY

SEQ ID NO: 48133 - protein, 9 aa, synthetic construct
PSQASLKLR

SEQ ID NO: 48134 - protein, 9 aa, synthetic construct
PSQASLKLH

SEQ ID NO: 48135 - protein, 9 aa, synthetic construct
PSQASLKLK

SEQ ID NO: 48136 - protein, 9 aa, synthetic construct
PSQASLKLF

SEQ ID NO: 48137 - protein, 9 aa, synthetic construct
PSQASLKVY

SEQ ID NO: 48138 - protein, 9 aa, synthetic construct
PSQASLKVR

SEQ ID NO: 48139 - protein, 9 aa, synthetic construct
PSQASLKVH

SEQ ID NO: 48140 - protein, 9 aa, synthetic construct
PSQASLKVK

SEQ ID NO: 48141 - protein, 9 aa, synthetic construct
PSQASLKVF

SEQ ID NO: 48142 - protein, 9 aa, synthetic construct
PSQASAHLY

SEQ ID NO: 48143 - protein, 9 aa, synthetic construct
PSQASAHVF

SEQ ID NO: 48144 - protein, 9 aa, synthetic construct
PSQASARLR

SEQ ID NO: 48145 - protein, 9 aa, synthetic construct
PSQASARLH

SEQ ID NO: 48146 - protein, 9 aa, synthetic construct
PSQASARVY

SEQ ID NO: 48147 - protein, 9 aa, synthetic construct
PSQASARVR

SEQ ID NO: 48148 - protein, 9 aa, synthetic construct
PSQASARVH

SEQ ID NO: 48149 - protein, 9 aa, synthetic construct
PSQASARVK

SEQ ID NO: 48150 - protein, 9 aa, synthetic construct
PSQASAKLR

SEQ ID NO: 48151 - protein, 9 aa, synthetic construct
PSQASAKLK

SEQ ID NO: 48152 - protein, 9 aa, synthetic construct
PSQASAKVR

SEQ ID NO: 48153 - protein, 9 aa, synthetic construct
PSQASAKVK

SEQ ID NO: 48154 - protein, 9 aa, synthetic construct
PSQASIHVY

SEQ ID NO: 48155 - protein, 9 aa, synthetic construct
PSQASIRLY

SEQ ID NO: 48156 - protein, 9 aa, synthetic construct
PSQASIRLR

SEQ ID NO: 48157 - protein, 9 aa, synthetic construct
PSQASIRLK

SEQ ID NO: 48158 - protein, 9 aa, synthetic construct
PSQASIRVR

SEQ ID NO: 48159 - protein, 9 aa, synthetic construct
PSQASIRVK

SEQ ID NO: 48160 - protein, 9 aa, synthetic construct
PSQASIRVF

SEQ ID NO: 48161 - protein, 9 aa, synthetic construct
PSQASIKLR

SEQ ID NO: 48162 - protein, 9 aa, synthetic construct
PSQASIKLK

SEQ ID NO: 48163 - protein, 9 aa, synthetic construct
PSQASIKVR

SEQ ID NO: 48164 - protein, 9 aa, synthetic construct
PSQASIKVK

SEQ ID NO: 48165 - protein, 9 aa, synthetic construct
PSQASIKVF

SEQ ID NO: 48166 - protein, 9 aa, synthetic construct
PSQASGHLK

SEQ ID NO: 48167 - protein, 9 aa, synthetic construct
PSQASGHVY

SEQ ID NO: 48168 - protein, 9 aa, synthetic construct
PSQASGHVR

SEQ ID NO: 48169 - protein, 9 aa, synthetic construct
PSQASGHVH

SEQ ID NO: 48170 - protein, 9 aa, synthetic construct
PSQASGHVK

SEQ ID NO: 48171 - protein, 9 aa, synthetic construct
PSQASGRLR

SEQ ID NO: 48172 - protein, 9 aa, synthetic construct
PSQASGRLK

SEQ ID NO: 48173 - protein, 9 aa, synthetic construct
PSQASGRLF

SEQ ID NO: 48174 - protein, 9 aa, synthetic construct
PSQASGRVY

SEQ ID NO: 48175 - protein, 9 aa, synthetic construct
PSQASGRVK

SEQ ID NO: 48176 - protein, 9 aa, synthetic construct
PSQASGRVF

SEQ ID NO: 48177 - protein, 9 aa, synthetic construct
PSQASGKLR

SEQ ID NO: 48178 - protein, 9 aa, synthetic construct
PSQASGKLK

SEQ ID NO: 48179 - protein, 9 aa, synthetic construct
PSQASGKVR

SEQ ID NO: 48180 - protein, 9 aa, synthetic construct
PSQASGKVK

SEQ ID NO: 48181 - protein, 9 aa, synthetic construct
PSQAVVHLY

SEQ ID NO: 48182 - protein, 9 aa, synthetic construct
PSQAVVHLK

SEQ ID NO: 48183 - protein, 9 aa, synthetic construct
PSQAVVHLF

SEQ ID NO: 48184 - protein, 9 aa, synthetic construct
PSQAVVHVY

SEQ ID NO: 48185 - protein, 9 aa, synthetic construct
PSQAVVHVR

SEQ ID NO: 48186 - protein, 9 aa, synthetic construct
PSQAVVRLY

SEQ ID NO: 48187 - protein, 9 aa, synthetic construct
PSQAVVRLR

SEQ ID NO: 48188 - protein, 9 aa, synthetic construct
PSQAVVRLK

SEQ ID NO: 48189 - protein, 9 aa, synthetic construct
PSQAVVRLF

SEQ ID NO: 48190 - protein, 9 aa, synthetic construct
PSQAVVRVY

SEQ ID NO: 48191 - protein, 9 aa, synthetic construct
PSQAVVRVR

SEQ ID NO: 48192 - protein, 9 aa, synthetic construct
PSQAVVRVH

SEQ ID NO: 48193 - protein, 9 aa, synthetic construct
PSQAVVRVK

SEQ ID NO: 48194 - protein, 9 aa, synthetic construct
PSQAVVKLR

SEQ ID NO: 48195 - protein, 9 aa, synthetic construct
PSQAVVKLK

SEQ ID NO: 48196 - protein, 9 aa, synthetic construct
PSQAVVKVR

SEQ ID NO: 48197 - protein, 9 aa, synthetic construct
PSQAVVKVK

SEQ ID NO: 48198 - protein, 9 aa, synthetic construct
PSQAVLHLY

SEQ ID NO: 48199 - protein, 9 aa, synthetic construct
PSQAVLHLR

SEQ ID NO: 48200 - protein, 9 aa, synthetic construct
PSQAVLHLH

SEQ ID NO: 48201 - protein, 9 aa, synthetic construct
PSQAVLHLK

SEQ ID NO: 48202 - protein, 9 aa, synthetic construct
PSQAVLHVY

SEQ ID NO: 48203 - protein, 9 aa, synthetic construct
PSQAVLHVR

SEQ ID NO: 48204 - protein, 9 aa, synthetic construct
PSQAVLHVH

SEQ ID NO: 48205 - protein, 9 aa, synthetic construct
PSQAVLHVK

SEQ ID NO: 48206 - protein, 9 aa, synthetic construct
PSQAVLHVF

SEQ ID NO: 48207 - protein, 9 aa, synthetic construct
PSQAVLRLY

SEQ ID NO: 48208 - protein, 9 aa, synthetic construct
PSQAVLRLR

SEQ ID NO: 48209 - protein, 9 aa, synthetic construct
PSQAVLRLK

SEQ ID NO: 48210 - protein, 9 aa, synthetic construct
PSQAVLRLF

SEQ ID NO: 48211 - protein, 9 aa, synthetic construct
PSQAVLRVY

SEQ ID NO: 48212 - protein, 9 aa, synthetic construct
PSQAVLRVH

SEQ ID NO: 48213 - protein, 9 aa, synthetic construct
PSQAVLRVK

SEQ ID NO: 48214 - protein, 9 aa, synthetic construct
PSQAVLRVF

SEQ ID NO: 48215 - protein, 9 aa, synthetic construct
PSQAVLKLY

SEQ ID NO: 48216 - protein, 9 aa, synthetic construct
PSQAVLKLR

SEQ ID NO: 48217 - protein, 9 aa, synthetic construct
PSQAVLKLK

SEQ ID NO: 48218 - protein, 9 aa, synthetic construct
PSQAVLKLF

SEQ ID NO: 48219 - protein, 9 aa, synthetic construct
PSQAVLKVR

SEQ ID NO: 48220 - protein, 9 aa, synthetic construct
PSQAVLKVH

SEQ ID NO: 48221 - protein, 9 aa, synthetic construct
PSQAVLKVK

SEQ ID NO: 48222 - protein, 9 aa, synthetic construct
PSQAVAHVY

SEQ ID NO: 48223 - protein, 9 aa, synthetic construct
PSQAVAHVK

SEQ ID NO: 48224 - protein, 9 aa, synthetic construct
PSQAVARLR

SEQ ID NO: 48225 - protein, 9 aa, synthetic construct
PSQAVARLH

SEQ ID NO: 48226 - protein, 9 aa, synthetic construct
PSQAVARLK

SEQ ID NO: 48227 - protein, 9 aa, synthetic construct
PSQAVARLF

SEQ ID NO: 48228 - protein, 9 aa, synthetic construct
PSQAVARVR

SEQ ID NO: 48229 - protein, 9 aa, synthetic construct
PSQAVARVH

SEQ ID NO: 48230 - protein, 9 aa, synthetic construct
PSQAVARVK

SEQ ID NO: 48231 - protein, 9 aa, synthetic construct
PSQAVAKLR

SEQ ID NO: 48232 - protein, 9 aa, synthetic construct
PSQAVAKLH

SEQ ID NO: 48233 - protein, 9 aa, synthetic construct
PSQAVAKLK

SEQ ID NO: 48234 - protein, 9 aa, synthetic construct
PSQAVAKVY

SEQ ID NO: 48235 - protein, 9 aa, synthetic construct
PSQAVAKVR

SEQ ID NO: 48236 - protein, 9 aa, synthetic construct
PSQAVAKVH

SEQ ID NO: 48237 - protein, 9 aa, synthetic construct
PSQAVAKVK

SEQ ID NO: 48238 - protein, 9 aa, synthetic construct
PSQAVAKVF

SEQ ID NO: 48239 - protein, 9 aa, synthetic construct
PSQAVIHLR

SEQ ID NO: 48240 - protein, 9 aa, synthetic construct
PSQAVIHLK

SEQ ID NO: 48241 - protein, 9 aa, synthetic construct
PSQAVIHLF

SEQ ID NO: 48242 - protein, 9 aa, synthetic construct
PSQAVIHVR

SEQ ID NO: 48243 - protein, 9 aa, synthetic construct
PSQAVIRLY

SEQ ID NO: 48244 - protein, 9 aa, synthetic construct
PSQAVIRLR

SEQ ID NO: 48245 - protein, 9 aa, synthetic construct
PSQAVIRLK

SEQ ID NO: 48246 - protein, 9 aa, synthetic construct
PSQAVIRVY

SEQ ID NO: 48247 - protein, 9 aa, synthetic construct
PSQAVIRVR

SEQ ID NO: 48248 - protein, 9 aa, synthetic construct
PSQAVIRVH

SEQ ID NO: 48249 - protein, 9 aa, synthetic construct
PSQAVIRVK

SEQ ID NO: 48250 - protein, 9 aa, synthetic construct
PSQAVIRVF

SEQ ID NO: 48251 - protein, 9 aa, synthetic construct
PSQAVIKLR

SEQ ID NO: 48252 - protein, 9 aa, synthetic construct
PSQAVIKVY

SEQ ID NO: 48253 - protein, 9 aa, synthetic construct
PSQAVIKVR

SEQ ID NO: 48254 - protein, 9 aa, synthetic construct
PSQAVIKVK

SEQ ID NO: 48255 - protein, 9 aa, synthetic construct
PSQAVIKVF

SEQ ID NO: 48256 - protein, 9 aa, synthetic construct
PSQAVGHLF

SEQ ID NO: 48257 - protein, 9 aa, synthetic construct
PSQAVGRLR

SEQ ID NO: 48258 - protein, 9 aa, synthetic construct
PSQAVGRLK

SEQ ID NO: 48259 - protein, 9 aa, synthetic construct
PSQAVGRLF

SEQ ID NO: 48260 - protein, 9 aa, synthetic construct
PSQAVGRVR

SEQ ID NO: 48261 - protein, 9 aa, synthetic construct
PSQAVGRVK

SEQ ID NO: 48262 - protein, 9 aa, synthetic construct
PSQAVGKLK

SEQ ID NO: 48263 - protein, 9 aa, synthetic construct
PSQAVGKVR

SEQ ID NO: 48264 - protein, 9 aa, synthetic construct
PSQAGVHLR

SEQ ID NO: 48265 - protein, 9 aa, synthetic construct
PSQAGVHLH

SEQ ID NO: 48266 - protein, 9 aa, synthetic construct
PSQAGVHLK

SEQ ID NO: 48267 - protein, 9 aa, synthetic construct
PSQAGVHLF

SEQ ID NO: 48268 - protein, 9 aa, synthetic construct
PSQAGVHVH

SEQ ID NO: 48269 - protein, 9 aa, synthetic construct
PSQAGVRLY

SEQ ID NO: 48270 - protein, 9 aa, synthetic construct
PSQAGVRLR

SEQ ID NO: 48271 - protein, 9 aa, synthetic construct
PSQAGVRLK

SEQ ID NO: 48272 - protein, 9 aa, synthetic construct
PSQAGVRLF

SEQ ID NO: 48273 - protein, 9 aa, synthetic construct
PSQAGVRVY

SEQ ID NO: 48274 - protein, 9 aa, synthetic construct
PSQAGVRVR

SEQ ID NO: 48275 - protein, 9 aa, synthetic construct
PSQAGVRVK

SEQ ID NO: 48276 - protein, 9 aa, synthetic construct
PSQAGVRVF

SEQ ID NO: 48277 - protein, 9 aa, synthetic construct
PSQAGVKLR

SEQ ID NO: 48278 - protein, 9 aa, synthetic construct
PSQAGVKLK

SEQ ID NO: 48279 - protein, 9 aa, synthetic construct
PSQAGVKVY

SEQ ID NO: 48280 - protein, 9 aa, synthetic construct
PSQAGVKVR

SEQ ID NO: 48281 - protein, 9 aa, synthetic construct
PSQAGVKVH

SEQ ID NO: 48282 - protein, 9 aa, synthetic construct
PSQAGVKVK

SEQ ID NO: 48283 - protein, 9 aa, synthetic construct
PSQAGVKVF

SEQ ID NO: 48284 - protein, 9 aa, synthetic construct
PSQAGLHLY

SEQ ID NO: 48285 - protein, 9 aa, synthetic construct
PSQAGLHLR

SEQ ID NO: 48286 - protein, 9 aa, synthetic construct
PSQAGLHLH

SEQ ID NO: 48287 - protein, 9 aa, synthetic construct
PSQAGLHLF

SEQ ID NO: 48288 - protein, 9 aa, synthetic construct
PSQAGLHVR

SEQ ID NO: 48289 - protein, 9 aa, synthetic construct
PSQAGLHVK

SEQ ID NO: 48290 - protein, 9 aa, synthetic construct
PSQAGLHVF

SEQ ID NO: 48291 - protein, 9 aa, synthetic construct
PSQAGLRLY

SEQ ID NO: 48292 - protein, 9 aa, synthetic construct
PSQAGLRLR

SEQ ID NO: 48293 - protein, 9 aa, synthetic construct
PSQAGLRLH

SEQ ID NO: 48294 - protein, 9 aa, synthetic construct
PSQAGLRLK

SEQ ID NO: 48295 - protein, 9 aa, synthetic construct
PSQAGLRLF

SEQ ID NO: 48296 - protein, 9 aa, synthetic construct
PSQAGLRVY

SEQ ID NO: 48297 - protein, 9 aa, synthetic construct
PSQAGLRVR

SEQ ID NO: 48298 - protein, 9 aa, synthetic construct
PSQAGLRVH

SEQ ID NO: 48299 - protein, 9 aa, synthetic construct
PSQAGLRVK

SEQ ID NO: 48300 - protein, 9 aa, synthetic construct
PSQAGLRVF

SEQ ID NO: 48301 - protein, 9 aa, synthetic construct
PSQAGLKLY

SEQ ID NO: 48302 - protein, 9 aa, synthetic construct
PSQAGLKLR

SEQ ID NO: 48303 - protein, 9 aa, synthetic construct
PSQAGLKLH

SEQ ID NO: 48304 - protein, 9 aa, synthetic construct
PSQAGLKLK

SEQ ID NO: 48305 - protein, 9 aa, synthetic construct
PSQAGLKLF

SEQ ID NO: 48306 - protein, 9 aa, synthetic construct
PSQAGLKVY

SEQ ID NO: 48307 - protein, 9 aa, synthetic construct
PSQAGLKVR

SEQ ID NO: 48308 - protein, 9 aa, synthetic construct
PSQAGLKVH

SEQ ID NO: 48309 - protein, 9 aa, synthetic construct
PSQAGLKVK

SEQ ID NO: 48310 - protein, 9 aa, synthetic construct
PSQAGLKVF

SEQ ID NO: 48311 - protein, 9 aa, synthetic construct
PSQAGAHLY

SEQ ID NO: 48312 - protein, 9 aa, synthetic construct
PSQAGAHLH

SEQ ID NO: 48313 - protein, 9 aa, synthetic construct
PSQAGARLY

SEQ ID NO: 48314 - protein, 9 aa, synthetic construct
PSQAGARLR

SEQ ID NO: 48315 - protein, 9 aa, synthetic construct
PSQAGARLH

SEQ ID NO: 48316 - protein, 9 aa, synthetic construct
PSQAGARLK

SEQ ID NO: 48317 - protein, 9 aa, synthetic construct
PSQAGARLF

SEQ ID NO: 48318 - protein, 9 aa, synthetic construct
PSQAGARVY

SEQ ID NO: 48319 - protein, 9 aa, synthetic construct
PSQAGARVR

SEQ ID NO: 48320 - protein, 9 aa, synthetic construct
PSQAGARVK

SEQ ID NO: 48321 - protein, 9 aa, synthetic construct
PSQAGAKLH

SEQ ID NO: 48322 - protein, 9 aa, synthetic construct
PSQAGAKLK

SEQ ID NO: 48323 - protein, 9 aa, synthetic construct
PSQAGAKVY

SEQ ID NO: 48324 - protein, 9 aa, synthetic construct
PSQAGAKVR

SEQ ID NO: 48325 - protein, 9 aa, synthetic construct
PSQAGAKVH

SEQ ID NO: 48326 - protein, 9 aa, synthetic construct
PSQAGAKVK

SEQ ID NO: 48327 - protein, 9 aa, synthetic construct
PSQAGAKVF

SEQ ID NO: 48328 - protein, 9 aa, synthetic construct
PSQAGIHLR

SEQ ID NO: 48329 - protein, 9 aa, synthetic construct
PSQAGIRLY

SEQ ID NO: 48330 - protein, 9 aa, synthetic construct
PSQAGIRVR

SEQ ID NO: 48331 - protein, 9 aa, synthetic construct
PSQAGIRVK

SEQ ID NO: 48332 - protein, 9 aa, synthetic construct
PSQAGIKLR

SEQ ID NO: 48333 - protein, 9 aa, synthetic construct
PSQAGIKLK

SEQ ID NO: 48334 - protein, 9 aa, synthetic construct
PSQAGIKVR

SEQ ID NO: 48335 - protein, 9 aa, synthetic construct
PSQAGIKVK

SEQ ID NO: 48336 - protein, 9 aa, synthetic construct
PSQAGGHLY

SEQ ID NO: 48337 - protein, 9 aa, synthetic construct
PSQAGGHLR

SEQ ID NO: 48338 - protein, 9 aa, synthetic construct
PSQAGGHLH

SEQ ID NO: 48339 - protein, 9 aa, synthetic construct
PSQAGGHVY

SEQ ID NO: 48340 - protein, 9 aa, synthetic construct
PSQAGGRLR

SEQ ID NO: 48341 - protein, 9 aa, synthetic construct
PSQAGGRLK

SEQ ID NO: 48342 - protein, 9 aa, synthetic construct
PSQAGGRLF

SEQ ID NO: 48343 - protein, 9 aa, synthetic construct
PSQAGGRVR

SEQ ID NO: 48344 - protein, 9 aa, synthetic construct
PSQAGGRVK

SEQ ID NO: 48345 - protein, 9 aa, synthetic construct
PSQAGGKLK

SEQ ID NO: 48346 - protein, 9 aa, synthetic construct
PSQAGGKLF

SEQ ID NO: 48347 - protein, 9 aa, synthetic construct
PSQAGGKVR

SEQ ID NO: 48348 - protein, 9 aa, synthetic construct
PSQAGGKVK

SEQ ID NO: 48349 - protein, 9 aa, synthetic construct
PSQAGGKVF

SEQ ID NO: 48350 - protein, 9 aa, synthetic construct
PSPGAVRLR

SEQ ID NO: 48351 - protein, 9 aa, synthetic construct
PSPGAVRLH

SEQ ID NO: 48352 - protein, 9 aa, synthetic construct
PSPGAVRVR

SEQ ID NO: 48353 - protein, 9 aa, synthetic construct
PSPGAVRVK

SEQ ID NO: 48354 - protein, 9 aa, synthetic construct
PSPGAVKLR

SEQ ID NO: 48355 - protein, 9 aa, synthetic construct
PSPGAVKLK

SEQ ID NO: 48356 - protein, 9 aa, synthetic construct
PSPGAVKVR

SEQ ID NO: 48357 - protein, 9 aa, synthetic construct
PSPGALHLF

SEQ ID NO: 48358 - protein, 9 aa, synthetic construct
PSPGALHVY

SEQ ID NO: 48359 - protein, 9 aa, synthetic construct
PSPGALHVF

SEQ ID NO: 48360 - protein, 9 aa, synthetic construct
PSPGALRLR

SEQ ID NO: 48361 - protein, 9 aa, synthetic construct
PSPGALRLH

SEQ ID NO: 48362 - protein, 9 aa, synthetic construct
PSPGALRLK

SEQ ID NO: 48363 - protein, 9 aa, synthetic construct
PSPGALRLF

SEQ ID NO: 48364 - protein, 9 aa, synthetic construct
PSPGALRVY

SEQ ID NO: 48365 - protein, 9 aa, synthetic construct
PSPGALRVR

SEQ ID NO: 48366 - protein, 9 aa, synthetic construct
PSPGALRVK

SEQ ID NO: 48367 - protein, 9 aa, synthetic construct
PSPGALKLY

SEQ ID NO: 48368 - protein, 9 aa, synthetic construct
PSPGALKLR

SEQ ID NO: 48369 - protein, 9 aa, synthetic construct
PSPGALKLK

SEQ ID NO: 48370 - protein, 9 aa, synthetic construct
PSPGALKVR

SEQ ID NO: 48371 - protein, 9 aa, synthetic construct
PSPGALKVK

SEQ ID NO: 48372 - protein, 9 aa, synthetic construct
PSPGAARLR

SEQ ID NO: 48373 - protein, 9 aa, synthetic construct
PSPGAARLK

SEQ ID NO: 48374 - protein, 9 aa, synthetic construct
PSPGAARVR

SEQ ID NO: 48375 - protein, 9 aa, synthetic construct
PSPGAARVH

SEQ ID NO: 48376 - protein, 9 aa, synthetic construct
PSPGAARVK

SEQ ID NO: 48377 - protein, 9 aa, synthetic construct
PSPGAIHVY

SEQ ID NO: 48378 - protein, 9 aa, synthetic construct
PSPGAIRLR

SEQ ID NO: 48379 - protein, 9 aa, synthetic construct
PSPGAIRLK

SEQ ID NO: 48380 - protein, 9 aa, synthetic construct
PSPGAIRLF

SEQ ID NO: 48381 - protein, 9 aa, synthetic construct
PSPGAIRVR

SEQ ID NO: 48382 - protein, 9 aa, synthetic construct
PSPGAIRVK

SEQ ID NO: 48383 - protein, 9 aa, synthetic construct
PSPGAIKLR

SEQ ID NO: 48384 - protein, 9 aa, synthetic construct
PSPGAIKLK

SEQ ID NO: 48385 - protein, 9 aa, synthetic construct
PSPGAIKVY

SEQ ID NO: 48386 - protein, 9 aa, synthetic construct
PSPGAIKVR

SEQ ID NO: 48387 - protein, 9 aa, synthetic construct
PSPGAIKVK

SEQ ID NO: 48388 - protein, 9 aa, synthetic construct
PSPGAGHVR

SEQ ID NO: 48389 - protein, 9 aa, synthetic construct
PSPGAGRLR

SEQ ID NO: 48390 - protein, 9 aa, synthetic construct
PSPGAGRLK

SEQ ID NO: 48391 - protein, 9 aa, synthetic construct
PSPGAGKLR

SEQ ID NO: 48392 - protein, 9 aa, synthetic construct
PSPGAGKLK

SEQ ID NO: 48393 - protein, 9 aa, synthetic construct
PSPGAGKVR

SEQ ID NO: 48394 - protein, 9 aa, synthetic construct
PSPGAGKVK

SEQ ID NO: 48395 - protein, 9 aa, synthetic construct
PSPGTVHLF

SEQ ID NO: 48396 - protein, 9 aa, synthetic construct
PSPGTVRLR

SEQ ID NO: 48397 - protein, 9 aa, synthetic construct
PSPGTVRLK

SEQ ID NO: 48398 - protein, 9 aa, synthetic construct
PSPGTVRVR

SEQ ID NO: 48399 - protein, 9 aa, synthetic construct
PSPGTVRVK

SEQ ID NO: 48400 - protein, 9 aa, synthetic construct
PSPGTVKLR

SEQ ID NO: 48401 - protein, 9 aa, synthetic construct
PSPGTLHLF

SEQ ID NO: 48402 - protein, 9 aa, synthetic construct
PSPGTLRLY

SEQ ID NO: 48403 - protein, 9 aa, synthetic construct
PSPGTLRLR

SEQ ID NO: 48404 - protein, 9 aa, synthetic construct
PSPGTLRLH

SEQ ID NO: 48405 - protein, 9 aa, synthetic construct
PSPGTLRVY

SEQ ID NO: 48406 - protein, 9 aa, synthetic construct
PSPGTLRVR

SEQ ID NO: 48407 - protein, 9 aa, synthetic construct
PSPGTLRVH

SEQ ID NO: 48408 - protein, 9 aa, synthetic construct
PSPGTLRVK

SEQ ID NO: 48409 - protein, 9 aa, synthetic construct
PSPGTLKLK

SEQ ID NO: 48410 - protein, 9 aa, synthetic construct
PSPGTLKVR

SEQ ID NO: 48411 - protein, 9 aa, synthetic construct
PSPGTLKVK

SEQ ID NO: 48412 - protein, 9 aa, synthetic construct
PSPGTARLR

SEQ ID NO: 48413 - protein, 9 aa, synthetic construct
PSPGTARLK

SEQ ID NO: 48414 - protein, 9 aa, synthetic construct
PSPGTARVR

SEQ ID NO: 48415 - protein, 9 aa, synthetic construct
PSPGTARVK

SEQ ID NO: 48416 - protein, 9 aa, synthetic construct
PSPGTAKVR

SEQ ID NO: 48417 - protein, 9 aa, synthetic construct
PSPGTIRLK

SEQ ID NO: 48418 - protein, 9 aa, synthetic construct
PSPGTIKLK

SEQ ID NO: 48419 - protein, 9 aa, synthetic construct
PSPGTGRVK

SEQ ID NO: 48420 - protein, 9 aa, synthetic construct
PSPGTGKLR

SEQ ID NO: 48421 - protein, 9 aa, synthetic construct
PSPGTGKLK

SEQ ID NO: 48422 - protein, 9 aa, synthetic construct
PSPGSVHVH

SEQ ID NO: 48423 - protein, 9 aa, synthetic construct
PSPGSVRLR

SEQ ID NO: 48424 - protein, 9 aa, synthetic construct
PSPGSVRLK

SEQ ID NO: 48425 - protein, 9 aa, synthetic construct
PSPGSVRLF

SEQ ID NO: 48426 - protein, 9 aa, synthetic construct
PSPGSVRVR

SEQ ID NO: 48427 - protein, 9 aa, synthetic construct
PSPGSVRVH

SEQ ID NO: 48428 - protein, 9 aa, synthetic construct
PSPGSVRVK

SEQ ID NO: 48429 - protein, 9 aa, synthetic construct
PSPGSVRVF

SEQ ID NO: 48430 - protein, 9 aa, synthetic construct
PSPGSVKLR

SEQ ID NO: 48431 - protein, 9 aa, synthetic construct
PSPGSVKLH

SEQ ID NO: 48432 - protein, 9 aa, synthetic construct
PSPGSVKLK

SEQ ID NO: 48433 - protein, 9 aa, synthetic construct
PSPGSVKVR

SEQ ID NO: 48434 - protein, 9 aa, synthetic construct
PSPGSLHLR

SEQ ID NO: 48435 - protein, 9 aa, synthetic construct
PSPGSLHVY

SEQ ID NO: 48436 - protein, 9 aa, synthetic construct
PSPGSLHVF

SEQ ID NO: 48437 - protein, 9 aa, synthetic construct
PSPGSLRLY

SEQ ID NO: 48438 - protein, 9 aa, synthetic construct
PSPGSLRLR

SEQ ID NO: 48439 - protein, 9 aa, synthetic construct
PSPGSLRLH

SEQ ID NO: 48440 - protein, 9 aa, synthetic construct
PSPGSLRLK

SEQ ID NO: 48441 - protein, 9 aa, synthetic construct
PSPGSLRLF

SEQ ID NO: 48442 - protein, 9 aa, synthetic construct
PSPGSLRVR

SEQ ID NO: 48443 - protein, 9 aa, synthetic construct
PSPGSLRVK

SEQ ID NO: 48444 - protein, 9 aa, synthetic construct
PSPGSLKLY

SEQ ID NO: 48445 - protein, 9 aa, synthetic construct
PSPGSLKLR

SEQ ID NO: 48446 - protein, 9 aa, synthetic construct
PSPGSLKLK

SEQ ID NO: 48447 - protein, 9 aa, synthetic construct
PSPGSLKVR

SEQ ID NO: 48448 - protein, 9 aa, synthetic construct
PSPGSLKVK

SEQ ID NO: 48449 - protein, 9 aa, synthetic construct
PSPGSARLY

SEQ ID NO: 48450 - protein, 9 aa, synthetic construct
PSPGSARLK

SEQ ID NO: 48451 - protein, 9 aa, synthetic construct
PSPGSARLF

SEQ ID NO: 48452 - protein, 9 aa, synthetic construct
PSPGSARVR

SEQ ID NO: 48453 - protein, 9 aa, synthetic construct
PSPGSARVK

SEQ ID NO: 48454 - protein, 9 aa, synthetic construct
PSPGSAKLR

SEQ ID NO: 48455 - protein, 9 aa, synthetic construct
PSPGSAKLK

SEQ ID NO: 48456 - protein, 9 aa, synthetic construct
PSPGSAKVR

SEQ ID NO: 48457 - protein, 9 aa, synthetic construct
PSPGSIRLR

SEQ ID NO: 48458 - protein, 9 aa, synthetic construct
PSPGSIRLK

SEQ ID NO: 48459 - protein, 9 aa, synthetic construct
PSPGSIKVK

SEQ ID NO: 48460 - protein, 9 aa, synthetic construct
PSPGSGHLR

SEQ ID NO: 48461 - protein, 9 aa, synthetic construct
PSPGSGRVK

SEQ ID NO: 48462 - protein, 9 aa, synthetic construct
PSPGSGKLR

SEQ ID NO: 48463 - protein, 9 aa, synthetic construct
PSPGSGKLK

SEQ ID NO: 48464 - protein, 9 aa, synthetic construct
PSPGSGKVR

SEQ ID NO: 48465 - protein, 9 aa, synthetic construct
PSPGSGKVK

SEQ ID NO: 48466 - protein, 9 aa, synthetic construct
PSPGVVHLR

SEQ ID NO: 48467 - protein, 9 aa, synthetic construct
PSPGVVRLH

SEQ ID NO: 48468 - protein, 9 aa, synthetic construct
PSPGVVRLK

SEQ ID NO: 48469 - protein, 9 aa, synthetic construct
PSPGVVRVY

SEQ ID NO: 48470 - protein, 9 aa, synthetic construct
PSPGVVRVK

SEQ ID NO: 48471 - protein, 9 aa, synthetic construct
PSPGVVKLR

SEQ ID NO: 48472 - protein, 9 aa, synthetic construct
PSPGVVKLK

SEQ ID NO: 48473 - protein, 9 aa, synthetic construct
PSPGVLHLR

SEQ ID NO: 48474 - protein, 9 aa, synthetic construct
PSPGVLHLF

SEQ ID NO: 48475 - protein, 9 aa, synthetic construct
PSPGVLRLR

SEQ ID NO: 48476 - protein, 9 aa, synthetic construct
PSPGVLRLH

SEQ ID NO: 48477 - protein, 9 aa, synthetic construct
PSPGVLRLK

SEQ ID NO: 48478 - protein, 9 aa, synthetic construct
PSPGVLRVY

SEQ ID NO: 48479 - protein, 9 aa, synthetic construct
PSPGVLRVR

SEQ ID NO: 48480 - protein, 9 aa, synthetic construct
PSPGVLRVH

SEQ ID NO: 48481 - protein, 9 aa, synthetic construct
PSPGVLRVK

SEQ ID NO: 48482 - protein, 9 aa, synthetic construct
PSPGVLRVF

SEQ ID NO: 48483 - protein, 9 aa, synthetic construct
PSPGVLKLK

SEQ ID NO: 48484 - protein, 9 aa, synthetic construct
PSPGVLKVR

SEQ ID NO: 48485 - protein, 9 aa, synthetic construct
PSPGVLKVK

SEQ ID NO: 48486 - protein, 9 aa, synthetic construct
PSPGVARLH

SEQ ID NO: 48487 - protein, 9 aa, synthetic construct
PSPGVARLK

SEQ ID NO: 48488 - protein, 9 aa, synthetic construct
PSPGVARVR

SEQ ID NO: 48489 - protein, 9 aa, synthetic construct
PSPGVARVK

SEQ ID NO: 48490 - protein, 9 aa, synthetic construct
PSPGVAKLK

SEQ ID NO: 48491 - protein, 9 aa, synthetic construct
PSPGVIRLH

SEQ ID NO: 48492 - protein, 9 aa, synthetic construct
PSPGVIRLK

SEQ ID NO: 48493 - protein, 9 aa, synthetic construct
PSPGVIKLR

SEQ ID NO: 48494 - protein, 9 aa, synthetic construct
PSPGVIKLK

SEQ ID NO: 48495 - protein, 9 aa, synthetic construct
PSPGVIKVR

SEQ ID NO: 48496 - protein, 9 aa, synthetic construct
PSPGVGHLY

SEQ ID NO: 48497 - protein, 9 aa, synthetic construct
PSPGVGHLF

SEQ ID NO: 48498 - protein, 9 aa, synthetic construct
PSPGVGRLR

SEQ ID NO: 48499 - protein, 9 aa, synthetic construct
PSPGVGRLK

SEQ ID NO: 48500 - protein, 9 aa, synthetic construct
PSPGVGRVR

SEQ ID NO: 48501 - protein, 9 aa, synthetic construct
PSPGVGKVR

SEQ ID NO: 48502 - protein, 9 aa, synthetic construct
PSPGVGKVK

SEQ ID NO: 48503 - protein, 9 aa, synthetic construct
PSPGGVHLR

SEQ ID NO: 48504 - protein, 9 aa, synthetic construct
PSPGGVHVH

SEQ ID NO: 48505 - protein, 9 aa, synthetic construct
PSPGGVRLR

SEQ ID NO: 48506 - protein, 9 aa, synthetic construct
PSPGGVRLH

SEQ ID NO: 48507 - protein, 9 aa, synthetic construct
PSPGGVRLK

SEQ ID NO: 48508 - protein, 9 aa, synthetic construct
PSPGGVRVK

SEQ ID NO: 48509 - protein, 9 aa, synthetic construct
PSPGGVRVF

SEQ ID NO: 48510 - protein, 9 aa, synthetic construct
PSPGGVKLR

SEQ ID NO: 48511 - protein, 9 aa, synthetic construct
PSPGGVKLK

SEQ ID NO: 48512 - protein, 9 aa, synthetic construct
PSPGGLHLR

SEQ ID NO: 48513 - protein, 9 aa, synthetic construct
PSPGGLRLY

SEQ ID NO: 48514 - protein, 9 aa, synthetic construct
PSPGGLRLR

SEQ ID NO: 48515 - protein, 9 aa, synthetic construct
PSPGGLRLH

SEQ ID NO: 48516 - protein, 9 aa, synthetic construct
PSPGGLRLK

SEQ ID NO: 48517 - protein, 9 aa, synthetic construct
PSPGGLRLF

SEQ ID NO: 48518 - protein, 9 aa, synthetic construct
PSPGGLRVY

SEQ ID NO: 48519 - protein, 9 aa, synthetic construct
PSPGGLRVR

SEQ ID NO: 48520 - protein, 9 aa, synthetic construct
PSPGGLRVH

SEQ ID NO: 48521 - protein, 9 aa, synthetic construct
PSPGGLRVK

SEQ ID NO: 48522 - protein, 9 aa, synthetic construct
PSPGGLRVF

SEQ ID NO: 48523 - protein, 9 aa, synthetic construct
PSPGGLKLR

SEQ ID NO: 48524 - protein, 9 aa, synthetic construct
PSPGGLKLH

SEQ ID NO: 48525 - protein, 9 aa, synthetic construct
PSPGGLKLK

SEQ ID NO: 48526 - protein, 9 aa, synthetic construct
PSPGGLKLF

SEQ ID NO: 48527 - protein, 9 aa, synthetic construct
PSPGGLKVY

SEQ ID NO: 48528 - protein, 9 aa, synthetic construct
PSPGGLKVK

SEQ ID NO: 48529 - protein, 9 aa, synthetic construct
PSPGGARLR

SEQ ID NO: 48530 - protein, 9 aa, synthetic construct
PSPGGARLH

SEQ ID NO: 48531 - protein, 9 aa, synthetic construct
PSPGGARLK

SEQ ID NO: 48532 - protein, 9 aa, synthetic construct
PSPGGARLF

SEQ ID NO: 48533 - protein, 9 aa, synthetic construct
PSPGGARVR

SEQ ID NO: 48534 - protein, 9 aa, synthetic construct
PSPGGARVK

SEQ ID NO: 48535 - protein, 9 aa, synthetic construct
PSPGGAKLR

SEQ ID NO: 48536 - protein, 9 aa, synthetic construct
PSPGGAKLK

SEQ ID NO: 48537 - protein, 9 aa, synthetic construct
PSPGGAKVK

SEQ ID NO: 48538 - protein, 9 aa, synthetic construct
PSPGGIRLR

SEQ ID NO: 48539 - protein, 9 aa, synthetic construct
PSPGGIRLK

SEQ ID NO: 48540 - protein, 9 aa, synthetic construct
PSPGGIRVR

SEQ ID NO: 48541 - protein, 9 aa, synthetic construct
PSPGGIKLK

SEQ ID NO: 48542 - protein, 9 aa, synthetic construct
PSPGGGRLR

SEQ ID NO: 48543 - protein, 9 aa, synthetic construct
PSPGGGRLK

SEQ ID NO: 48544 - protein, 9 aa, synthetic construct
PSPGGGRVR

SEQ ID NO: 48545 - protein, 9 aa, synthetic construct
PSPGGGRVK

SEQ ID NO: 48546 - protein, 9 aa, synthetic construct
PSPGGGKLR

SEQ ID NO: 48547 - protein, 9 aa, synthetic construct
PSPGGGKVK

SEQ ID NO: 48548 - protein, 9 aa, synthetic construct
PSPAAVRLR

SEQ ID NO: 48549 - protein, 9 aa, synthetic construct
PSPAAVRLK

SEQ ID NO: 48550 - protein, 9 aa, synthetic construct
PSPAAVRVR

SEQ ID NO: 48551 - protein, 9 aa, synthetic construct
PSPAAVKVR

SEQ ID NO: 48552 - protein, 9 aa, synthetic construct
PSPAAVKVK

SEQ ID NO: 48553 - protein, 9 aa, synthetic construct
PSPAALHLY

SEQ ID NO: 48554 - protein, 9 aa, synthetic construct
PSPAALHLR

SEQ ID NO: 48555 - protein, 9 aa, synthetic construct
PSPAALRLR

SEQ ID NO: 48556 - protein, 9 aa, synthetic construct
PSPAALRLH

SEQ ID NO: 48557 - protein, 9 aa, synthetic construct
PSPAALRLK

SEQ ID NO: 48558 - protein, 9 aa, synthetic construct
PSPAALRVY

SEQ ID NO: 48559 - protein, 9 aa, synthetic construct
PSPAALRVR

SEQ ID NO: 48560 - protein, 9 aa, synthetic construct
PSPAALRVK

SEQ ID NO: 48561 - protein, 9 aa, synthetic construct
PSPAALKVR

SEQ ID NO: 48562 - protein, 9 aa, synthetic construct
PSPAALKVK

SEQ ID NO: 48563 - protein, 9 aa, synthetic construct
PSPAAARLR

SEQ ID NO: 48564 - protein, 9 aa, synthetic construct
PSPAAARLH

SEQ ID NO: 48565 - protein, 9 aa, synthetic construct
PSPAAARVK

SEQ ID NO: 48566 - protein, 9 aa, synthetic construct
PSPAAAKLR

SEQ ID NO: 48567 - protein, 9 aa, synthetic construct
PSPAAAKLK

SEQ ID NO: 48568 - protein, 9 aa, synthetic construct
PSPAAAKVK

SEQ ID NO: 48569 - protein, 9 aa, synthetic construct
PSPAAIRLR

SEQ ID NO: 48570 - protein, 9 aa, synthetic construct
PSPAAIRVR

SEQ ID NO: 48571 - protein, 9 aa, synthetic construct
PSPAAIRVK

SEQ ID NO: 48572 - protein, 9 aa, synthetic construct
PSPAAIKVK

SEQ ID NO: 48573 - protein, 9 aa, synthetic construct
PSPAAGRLR

SEQ ID NO: 48574 - protein, 9 aa, synthetic construct
PSPAAGRVK

SEQ ID NO: 48575 - protein, 9 aa, synthetic construct
PSPAAGKVR

SEQ ID NO: 48576 - protein, 9 aa, synthetic construct
PSPAAGKVK

SEQ ID NO: 48577 - protein, 9 aa, synthetic construct
PSPATVRLR

SEQ ID NO: 48578 - protein, 9 aa, synthetic construct
PSPATVRLK

SEQ ID NO: 48579 - protein, 9 aa, synthetic construct
PSPATVRVR

SEQ ID NO: 48580 - protein, 9 aa, synthetic construct
PSPATVKLR

SEQ ID NO: 48581 - protein, 9 aa, synthetic construct
PSPATVKVR

SEQ ID NO: 48582 - protein, 9 aa, synthetic construct
PSPATLRLK

SEQ ID NO: 48583 - protein, 9 aa, synthetic construct
PSPATLRVR

SEQ ID NO: 48584 - protein, 9 aa, synthetic construct
PSPATLRVH

SEQ ID NO: 48585 - protein, 9 aa, synthetic construct
PSPATLRVK

SEQ ID NO: 48586 - protein, 9 aa, synthetic construct
PSPATLKLR

SEQ ID NO: 48587 - protein, 9 aa, synthetic construct
PSPATLKVR

SEQ ID NO: 48588 - protein, 9 aa, synthetic construct
PSPATARLR

SEQ ID NO: 48589 - protein, 9 aa, synthetic construct
PSPATARVK

SEQ ID NO: 48590 - protein, 9 aa, synthetic construct
PSPATAKLR

SEQ ID NO: 48591 - protein, 9 aa, synthetic construct
PSPATAKVR

SEQ ID NO: 48592 - protein, 9 aa, synthetic construct
PSPATAKVK

SEQ ID NO: 48593 - protein, 9 aa, synthetic construct
PSPATIRLK

SEQ ID NO: 48594 - protein, 9 aa, synthetic construct
PSPATIRVK

SEQ ID NO: 48595 - protein, 9 aa, synthetic construct
PSPATIKVR

SEQ ID NO: 48596 - protein, 9 aa, synthetic construct
PSPATGRLR

SEQ ID NO: 48597 - protein, 9 aa, synthetic construct
PSPATGRLK

SEQ ID NO: 48598 - protein, 9 aa, synthetic construct
PSPATGKLR

SEQ ID NO: 48599 - protein, 9 aa, synthetic construct
PSPATGKVR

SEQ ID NO: 48600 - protein, 9 aa, synthetic construct
PSPATGKVK

SEQ ID NO: 48601 - protein, 9 aa, synthetic construct
PSPASVHLR

SEQ ID NO: 48602 - protein, 9 aa, synthetic construct
PSPASVHLH

SEQ ID NO: 48603 - protein, 9 aa, synthetic construct
PSPASVHLF

SEQ ID NO: 48604 - protein, 9 aa, synthetic construct
PSPASVHVH

SEQ ID NO: 48605 - protein, 9 aa, synthetic construct
PSPASVRLR

SEQ ID NO: 48606 - protein, 9 aa, synthetic construct
PSPASVRLH

SEQ ID NO: 48607 - protein, 9 aa, synthetic construct
PSPASVRLK

SEQ ID NO: 48608 - protein, 9 aa, synthetic construct
PSPASVRVH

SEQ ID NO: 48609 - protein, 9 aa, synthetic construct
PSPASVRVK

SEQ ID NO: 48610 - protein, 9 aa, synthetic construct
PSPASVKVR

SEQ ID NO: 48611 - protein, 9 aa, synthetic construct
PSPASVKVK

SEQ ID NO: 48612 - protein, 9 aa, synthetic construct
PSPASLHLF

SEQ ID NO: 48613 - protein, 9 aa, synthetic construct
PSPASLHVY

SEQ ID NO: 48614 - protein, 9 aa, synthetic construct
PSPASLHVH

SEQ ID NO: 48615 - protein, 9 aa, synthetic construct
PSPASLHVF

SEQ ID NO: 48616 - protein, 9 aa, synthetic construct
PSPASLRLR

SEQ ID NO: 48617 - protein, 9 aa, synthetic construct
PSPASLRLK

SEQ ID NO: 48618 - protein, 9 aa, synthetic construct
PSPASLRVY

SEQ ID NO: 48619 - protein, 9 aa, synthetic construct
PSPASLRVR

SEQ ID NO: 48620 - protein, 9 aa, synthetic construct
PSPASLRVH

SEQ ID NO: 48621 - protein, 9 aa, synthetic construct
PSPASLRVK

SEQ ID NO: 48622 - protein, 9 aa, synthetic construct
PSPASLRVF

SEQ ID NO: 48623 - protein, 9 aa, synthetic construct
PSPASLKLR

SEQ ID NO: 48624 - protein, 9 aa, synthetic construct
PSPASLKLK

SEQ ID NO: 48625 - protein, 9 aa, synthetic construct
PSPASLKLF

SEQ ID NO: 48626 - protein, 9 aa, synthetic construct
PSPASLKVR

SEQ ID NO: 48627 - protein, 9 aa, synthetic construct
PSPASLKVH

SEQ ID NO: 48628 - protein, 9 aa, synthetic construct
PSPASLKVK

SEQ ID NO: 48629 - protein, 9 aa, synthetic construct
PSPASLKVF

SEQ ID NO: 48630 - protein, 9 aa, synthetic construct
PSPASARLR

SEQ ID NO: 48631 - protein, 9 aa, synthetic construct
PSPASARLK

SEQ ID NO: 48632 - protein, 9 aa, synthetic construct
PSPASARLF

SEQ ID NO: 48633 - protein, 9 aa, synthetic construct
PSPASARVR

SEQ ID NO: 48634 - protein, 9 aa, synthetic construct
PSPASARVK

SEQ ID NO: 48635 - protein, 9 aa, synthetic construct
PSPASAKLR

SEQ ID NO: 48636 - protein, 9 aa, synthetic construct
PSPASAKLK

SEQ ID NO: 48637 - protein, 9 aa, synthetic construct
PSPASAKVK

SEQ ID NO: 48638 - protein, 9 aa, synthetic construct
PSPASIRLY

SEQ ID NO: 48639 - protein, 9 aa, synthetic construct
PSPASIRLR

SEQ ID NO: 48640 - protein, 9 aa, synthetic construct
PSPASIRLK

SEQ ID NO: 48641 - protein, 9 aa, synthetic construct
PSPASIKLR

SEQ ID NO: 48642 - protein, 9 aa, synthetic construct
PSPASIKVR

SEQ ID NO: 48643 - protein, 9 aa, synthetic construct
PSPASGRLR

SEQ ID NO: 48644 - protein, 9 aa, synthetic construct
PSPASGRLK

SEQ ID NO: 48645 - protein, 9 aa, synthetic construct
PSPASGRVR

SEQ ID NO: 48646 - protein, 9 aa, synthetic construct
PSPASGRVH

SEQ ID NO: 48647 - protein, 9 aa, synthetic construct
PSPASGRVK

SEQ ID NO: 48648 - protein, 9 aa, synthetic construct
PSPASGKLR

SEQ ID NO: 48649 - protein, 9 aa, synthetic construct
PSPASGKLK

SEQ ID NO: 48650 - protein, 9 aa, synthetic construct
PSPASGKVR

SEQ ID NO: 48651 - protein, 9 aa, synthetic construct
PSPASGKVK

SEQ ID NO: 48652 - protein, 9 aa, synthetic construct
PSPAVVRLK

SEQ ID NO: 48653 - protein, 9 aa, synthetic construct
PSPAVLHLY

SEQ ID NO: 48654 - protein, 9 aa, synthetic construct
PSPAVLHLR

SEQ ID NO: 48655 - protein, 9 aa, synthetic construct
PSPAVLHLH

SEQ ID NO: 48656 - protein, 9 aa, synthetic construct
PSPAVLHLK

SEQ ID NO: 48657 - protein, 9 aa, synthetic construct
PSPAVLHLF

SEQ ID NO: 48658 - protein, 9 aa, synthetic construct
PSPAVLHVY

SEQ ID NO: 48659 - protein, 9 aa, synthetic construct
PSPAVLHVR

SEQ ID NO: 48660 - protein, 9 aa, synthetic construct
PSPAVLHVF

SEQ ID NO: 48661 - protein, 9 aa, synthetic construct
PSPAVLRLK

SEQ ID NO: 48662 - protein, 9 aa, synthetic construct
PSPAVLRVH

SEQ ID NO: 48663 - protein, 9 aa, synthetic construct
PSPAVLRVF

SEQ ID NO: 48664 - protein, 9 aa, synthetic construct
PSPAVLKLR

SEQ ID NO: 48665 - protein, 9 aa, synthetic construct
PSPAVLKLK

SEQ ID NO: 48666 - protein, 9 aa, synthetic construct
PSPAVLKVK

SEQ ID NO: 48667 - protein, 9 aa, synthetic construct
PSPAVAHVY

SEQ ID NO: 48668 - protein, 9 aa, synthetic construct
PSPAVAHVF

SEQ ID NO: 48669 - protein, 9 aa, synthetic construct
PSPAVARLR

SEQ ID NO: 48670 - protein, 9 aa, synthetic construct
PSPAVARLK

SEQ ID NO: 48671 - protein, 9 aa, synthetic construct
PSPAVARVY

SEQ ID NO: 48672 - protein, 9 aa, synthetic construct
PSPAVARVR

SEQ ID NO: 48673 - protein, 9 aa, synthetic construct
PSPAVARVH

SEQ ID NO: 48674 - protein, 9 aa, synthetic construct
PSPAVARVK

SEQ ID NO: 48675 - protein, 9 aa, synthetic construct
PSPAVAKLR

SEQ ID NO: 48676 - protein, 9 aa, synthetic construct
PSPAVAKLK

SEQ ID NO: 48677 - protein, 9 aa, synthetic construct
PSPAVAKVR

SEQ ID NO: 48678 - protein, 9 aa, synthetic construct
PSPAVAKVK

SEQ ID NO: 48679 - protein, 9 aa, synthetic construct
PSPAVIRLK

SEQ ID NO: 48680 - protein, 9 aa, synthetic construct
PSPAVIRLF

SEQ ID NO: 48681 - protein, 9 aa, synthetic construct
PSPAVIRVR

SEQ ID NO: 48682 - protein, 9 aa, synthetic construct
PSPAVIKLR

SEQ ID NO: 48683 - protein, 9 aa, synthetic construct
PSPAVIKVR

SEQ ID NO: 48684 - protein, 9 aa, synthetic construct
PSPAVIKVK

SEQ ID NO: 48685 - protein, 9 aa, synthetic construct
PSPAVGHLY

SEQ ID NO: 48686 - protein, 9 aa, synthetic construct
PSPAVGRLR

SEQ ID NO: 48687 - protein, 9 aa, synthetic construct
PSPAVGRLK

SEQ ID NO: 48688 - protein, 9 aa, synthetic construct
PSPAVGRVR

SEQ ID NO: 48689 - protein, 9 aa, synthetic construct
PSPAVGKLR

SEQ ID NO: 48690 - protein, 9 aa, synthetic construct
PSPAVGKLK

SEQ ID NO: 48691 - protein, 9 aa, synthetic construct
PSPAVGKVK

SEQ ID NO: 48692 - protein, 9 aa, synthetic construct
PSPAGVHLR

SEQ ID NO: 48693 - protein, 9 aa, synthetic construct
PSPAGVHLH

SEQ ID NO: 48694 - protein, 9 aa, synthetic construct
PSPAGVHLK

SEQ ID NO: 48695 - protein, 9 aa, synthetic construct
PSPAGVHLF

SEQ ID NO: 48696 - protein, 9 aa, synthetic construct
PSPAGVHVH

SEQ ID NO: 48697 - protein, 9 aa, synthetic construct
PSPAGVRLK

SEQ ID NO: 48698 - protein, 9 aa, synthetic construct
PSPAGVRVR

SEQ ID NO: 48699 - protein, 9 aa, synthetic construct
PSPAGVKLK

SEQ ID NO: 48700 - protein, 9 aa, synthetic construct
PSPAGVKVR

SEQ ID NO: 48701 - protein, 9 aa, synthetic construct
PSPAGLHLY

SEQ ID NO: 48702 - protein, 9 aa, synthetic construct
PSPAGLHLR

SEQ ID NO: 48703 - protein, 9 aa, synthetic construct
PSPAGLHLH

SEQ ID NO: 48704 - protein, 9 aa, synthetic construct
PSPAGLHLK

SEQ ID NO: 48705 - protein, 9 aa, synthetic construct
PSPAGLHLF

SEQ ID NO: 48706 - protein, 9 aa, synthetic construct
PSPAGLHVY

SEQ ID NO: 48707 - protein, 9 aa, synthetic construct
PSPAGLHVR

SEQ ID NO: 48708 - protein, 9 aa, synthetic construct
PSPAGLHVF

SEQ ID NO: 48709 - protein, 9 aa, synthetic construct
PSPAGLRLY

SEQ ID NO: 48710 - protein, 9 aa, synthetic construct
PSPAGLRLR

SEQ ID NO: 48711 - protein, 9 aa, synthetic construct
PSPAGLRLH

SEQ ID NO: 48712 - protein, 9 aa, synthetic construct
PSPAGLRLK

SEQ ID NO: 48713 - protein, 9 aa, synthetic construct
PSPAGLRLF

SEQ ID NO: 48714 - protein, 9 aa, synthetic construct
PSPAGLRVY

SEQ ID NO: 48715 - protein, 9 aa, synthetic construct
PSPAGLRVR

SEQ ID NO: 48716 - protein, 9 aa, synthetic construct
PSPAGLRVH

SEQ ID NO: 48717 - protein, 9 aa, synthetic construct
PSPAGLRVK

SEQ ID NO: 48718 - protein, 9 aa, synthetic construct
PSPAGLRVF

SEQ ID NO: 48719 - protein, 9 aa, synthetic construct
PSPAGLKLR

SEQ ID NO: 48720 - protein, 9 aa, synthetic construct
PSPAGLKLH

SEQ ID NO: 48721 - protein, 9 aa, synthetic construct
PSPAGLKLK

SEQ ID NO: 48722 - protein, 9 aa, synthetic construct
PSPAGLKLF

SEQ ID NO: 48723 - protein, 9 aa, synthetic construct
PSPAGLKVR

SEQ ID NO: 48724 - protein, 9 aa, synthetic construct
PSPAGLKVK

SEQ ID NO: 48725 - protein, 9 aa, synthetic construct
PSPAGARLR

SEQ ID NO: 48726 - protein, 9 aa, synthetic construct
PSPAGARLH

SEQ ID NO: 48727 - protein, 9 aa, synthetic construct
PSPAGARLK

SEQ ID NO: 48728 - protein, 9 aa, synthetic construct
PSPAGARLF

SEQ ID NO: 48729 - protein, 9 aa, synthetic construct
PSPAGARVR

SEQ ID NO: 48730 - protein, 9 aa, synthetic construct
PSPAGARVK

SEQ ID NO: 48731 - protein, 9 aa, synthetic construct
PSPAGAKLR

SEQ ID NO: 48732 - protein, 9 aa, synthetic construct
PSPAGAKLK

SEQ ID NO: 48733 - protein, 9 aa, synthetic construct
PSPAGAKVR

SEQ ID NO: 48734 - protein, 9 aa, synthetic construct
PSPAGAKVK

SEQ ID NO: 48735 - protein, 9 aa, synthetic construct
PSPAGIRVR

SEQ ID NO: 48736 - protein, 9 aa, synthetic construct
PSPAGIRVK

SEQ ID NO: 48737 - protein, 9 aa, synthetic construct
PSPAGIKLK

SEQ ID NO: 48738 - protein, 9 aa, synthetic construct
PSPAGIKVK

SEQ ID NO: 48739 - protein, 9 aa, synthetic construct
PSPAGGRLR

SEQ ID NO: 48740 - protein, 9 aa, synthetic construct
PSPAGGRLK

SEQ ID NO: 48741 - protein, 9 aa, synthetic construct
PSPAGGKLR

SEQ ID NO: 48742 - protein, 9 aa, synthetic construct
PSPAGGKLK

SEQ ID NO: 48743 - protein, 9 aa, synthetic construct
PSPAGGKVR

SEQ ID NO: 48744 - protein, 9 aa, synthetic construct
PANGALRLR

SEQ ID NO: 48745 - protein, 9 aa, synthetic construct
PANGALRLK

SEQ ID NO: 48746 - protein, 9 aa, synthetic construct
PANGALKLK

SEQ ID NO: 48747 - protein, 9 aa, synthetic construct
PANGALKVK

SEQ ID NO: 48748 - protein, 9 aa, synthetic construct
PANGAIRVR

SEQ ID NO: 48749 - protein, 9 aa, synthetic construct
PANGAGRLR

SEQ ID NO: 48750 - protein, 9 aa, synthetic construct
PANGAGRVR

SEQ ID NO: 48751 - protein, 9 aa, synthetic construct
PANGTVRLR

SEQ ID NO: 48752 - protein, 9 aa, synthetic construct
PANGTLRLR

SEQ ID NO: 48753 - protein, 9 aa, synthetic construct
PANGTARLR

SEQ ID NO: 48754 - protein, 9 aa, synthetic construct
PANGSVRLR

SEQ ID NO: 48755 - protein, 9 aa, synthetic construct
PANGSVRLK

SEQ ID NO: 48756 - protein, 9 aa, synthetic construct
PANGSVRVR

SEQ ID NO: 48757 - protein, 9 aa, synthetic construct
PANGSVKLR

SEQ ID NO: 48758 - protein, 9 aa, synthetic construct
PANGSLRLY

SEQ ID NO: 48759 - protein, 9 aa, synthetic construct
PANGSLRLR

SEQ ID NO: 48760 - protein, 9 aa, synthetic construct
PANGSLRLH

SEQ ID NO: 48761 - protein, 9 aa, synthetic construct
PANGSLRLK

SEQ ID NO: 48762 - protein, 9 aa, synthetic construct
PANGSLRLF

SEQ ID NO: 48763 - protein, 9 aa, synthetic construct
PANGSLKLR

SEQ ID NO: 48764 - protein, 9 aa, synthetic construct
PANGSLKLK

SEQ ID NO: 48765 - protein, 9 aa, synthetic construct
PANGSLKVK

SEQ ID NO: 48766 - protein, 9 aa, synthetic construct
PANGSARLR

SEQ ID NO: 48767 - protein, 9 aa, synthetic construct
PANGSARVR

SEQ ID NO: 48768 - protein, 9 aa, synthetic construct
PANGSARVK

SEQ ID NO: 48769 - protein, 9 aa, synthetic construct
PANGSIRLR

SEQ ID NO: 48770 - protein, 9 aa, synthetic construct
PANGSIKLR

SEQ ID NO: 48771 - protein, 9 aa, synthetic construct
PANGSIKVK

SEQ ID NO: 48772 - protein, 9 aa, synthetic construct
PANGSGRVR

SEQ ID NO: 48773 - protein, 9 aa, synthetic construct
PANGSGRVK

SEQ ID NO: 48774 - protein, 9 aa, synthetic construct
PANGVVKVK

SEQ ID NO: 48775 - protein, 9 aa, synthetic construct
PANGVLHLY

SEQ ID NO: 48776 - protein, 9 aa, synthetic construct
PANGVLRVR

SEQ ID NO: 48777 - protein, 9 aa, synthetic construct
PANGVLKVK

SEQ ID NO: 48778 - protein, 9 aa, synthetic construct
PANGVARLR

SEQ ID NO: 48779 - protein, 9 aa, synthetic construct
PANGVARLK

SEQ ID NO: 48780 - protein, 9 aa, synthetic construct
PANGVARVR

SEQ ID NO: 48781 - protein, 9 aa, synthetic construct
PANGVAKVK

SEQ ID NO: 48782 - protein, 9 aa, synthetic construct
PANGVIRLK

SEQ ID NO: 48783 - protein, 9 aa, synthetic construct
PANGVIRVR

SEQ ID NO: 48784 - protein, 9 aa, synthetic construct
PANGVIRVK

SEQ ID NO: 48785 - protein, 9 aa, synthetic construct
PANGVIRVF

SEQ ID NO: 48786 - protein, 9 aa, synthetic construct
PANGVIKVR

SEQ ID NO: 48787 - protein, 9 aa, synthetic construct
PANGVGRLR

SEQ ID NO: 48788 - protein, 9 aa, synthetic construct
PANGVGRLK

SEQ ID NO: 48789 - protein, 9 aa, synthetic construct
PANGGVHVH

SEQ ID NO: 48790 - protein, 9 aa, synthetic construct
PANGGVRLR

SEQ ID NO: 48791 - protein, 9 aa, synthetic construct
PANGGVRLK

SEQ ID NO: 48792 - protein, 9 aa, synthetic construct
PANGGVRVR

SEQ ID NO: 48793 - protein, 9 aa, synthetic construct
PANGGLRLR

SEQ ID NO: 48794 - protein, 9 aa, synthetic construct
PANGGLRVR

SEQ ID NO: 48795 - protein, 9 aa, synthetic construct
PANGGLRVK

SEQ ID NO: 48796 - protein, 9 aa, synthetic construct
PANGGLKLR

SEQ ID NO: 48797 - protein, 9 aa, synthetic construct
PANGGLKLK

SEQ ID NO: 48798 - protein, 9 aa, synthetic construct
PANGGLKVR

SEQ ID NO: 48799 - protein, 9 aa, synthetic construct
PANGGLKVK

SEQ ID NO: 48800 - protein, 9 aa, synthetic construct
PANGGARLR

SEQ ID NO: 48801 - protein, 9 aa, synthetic construct
PANGGARLK

SEQ ID NO: 48802 - protein, 9 aa, synthetic construct
PANGGGKVK

SEQ ID NO: 48803 - protein, 9 aa, synthetic construct
PANAALRLR

SEQ ID NO: 48804 - protein, 9 aa, synthetic construct
PANAALKVR

SEQ ID NO: 48805 - protein, 9 aa, synthetic construct
PANAAARLR

SEQ ID NO: 48806 - protein, 9 aa, synthetic construct
PANAAARVK

SEQ ID NO: 48807 - protein, 9 aa, synthetic construct
PANAAAKLR

SEQ ID NO: 48808 - protein, 9 aa, synthetic construct
PANAAAKVR

SEQ ID NO: 48809 - protein, 9 aa, synthetic construct
PANATVRVR

SEQ ID NO: 48810 - protein, 9 aa, synthetic construct
PANATVKVR

SEQ ID NO: 48811 - protein, 9 aa, synthetic construct
PANATLRLK

SEQ ID NO: 48812 - protein, 9 aa, synthetic construct
PANATLRVY

SEQ ID NO: 48813 - protein, 9 aa, synthetic construct
PANATLRVR

SEQ ID NO: 48814 - protein, 9 aa, synthetic construct
PANATLKVR

SEQ ID NO: 48815 - protein, 9 aa, synthetic construct
PANATARLR

SEQ ID NO: 48816 - protein, 9 aa, synthetic construct
PANATAKVR

SEQ ID NO: 48817 - protein, 9 aa, synthetic construct
PANATIRLK

SEQ ID NO: 48818 - protein, 9 aa, synthetic construct
PANATIRVR

SEQ ID NO: 48819 - protein, 9 aa, synthetic construct
PANATIKVK

SEQ ID NO: 48820 - protein, 9 aa, synthetic construct
PANATGRVK

SEQ ID NO: 48821 - protein, 9 aa, synthetic construct
PANATGKLR

SEQ ID NO: 48822 - protein, 9 aa, synthetic construct
PANASVRLR

SEQ ID NO: 48823 - protein, 9 aa, synthetic construct
PANASVRLK

SEQ ID NO: 48824 - protein, 9 aa, synthetic construct
PANASVRVR

SEQ ID NO: 48825 - protein, 9 aa, synthetic construct
PANASVKLR

SEQ ID NO: 48826 - protein, 9 aa, synthetic construct
PANASLHLY

SEQ ID NO: 48827 - protein, 9 aa, synthetic construct
PANASLHLR

SEQ ID NO: 48828 - protein, 9 aa, synthetic construct
PANASLRLY

SEQ ID NO: 48829 - protein, 9 aa, synthetic construct
PANASLRLR

SEQ ID NO: 48830 - protein, 9 aa, synthetic construct
PANASLRLH

SEQ ID NO: 48831 - protein, 9 aa, synthetic construct
PANASLRLK

SEQ ID NO: 48832 - protein, 9 aa, synthetic construct
PANASLRLF

SEQ ID NO: 48833 - protein, 9 aa, synthetic construct
PANASLRVR

SEQ ID NO: 48834 - protein, 9 aa, synthetic construct
PANASLRVK

SEQ ID NO: 48835 - protein, 9 aa, synthetic construct
PANASLKLR

SEQ ID NO: 48836 - protein, 9 aa, synthetic construct
PANASLKLK

SEQ ID NO: 48837 - protein, 9 aa, synthetic construct
PANASLKVR

SEQ ID NO: 48838 - protein, 9 aa, synthetic construct
PANASLKVK

SEQ ID NO: 48839 - protein, 9 aa, synthetic construct
PANASARVR

SEQ ID NO: 48840 - protein, 9 aa, synthetic construct
PANASIKLR

SEQ ID NO: 48841 - protein, 9 aa, synthetic construct
PANAVVRLR

SEQ ID NO: 48842 - protein, 9 aa, synthetic construct
PANAVLHLY

SEQ ID NO: 48843 - protein, 9 aa, synthetic construct
PANAVLHLK

SEQ ID NO: 48844 - protein, 9 aa, synthetic construct
PANAVLHLF

SEQ ID NO: 48845 - protein, 9 aa, synthetic construct
PANAVLHVR

SEQ ID NO: 48846 - protein, 9 aa, synthetic construct
PANAVLHVF

SEQ ID NO: 48847 - protein, 9 aa, synthetic construct
PANAVLRLY

SEQ ID NO: 48848 - protein, 9 aa, synthetic construct
PANAVLRLR

SEQ ID NO: 48849 - protein, 9 aa, synthetic construct
PANAVLRLK

SEQ ID NO: 48850 - protein, 9 aa, synthetic construct
PANAVLRLF

SEQ ID NO: 48851 - protein, 9 aa, synthetic construct
PANAVLRVR

SEQ ID NO: 48852 - protein, 9 aa, synthetic construct
PANAVLRVK

SEQ ID NO: 48853 - protein, 9 aa, synthetic construct
PANAVLKLK

SEQ ID NO: 48854 - protein, 9 aa, synthetic construct
PANAVLKVR

SEQ ID NO: 48855 - protein, 9 aa, synthetic construct
PANAVARLY

SEQ ID NO: 48856 - protein, 9 aa, synthetic construct
PANAVARLR

SEQ ID NO: 48857 - protein, 9 aa, synthetic construct
PANAVARLK

SEQ ID NO: 48858 - protein, 9 aa, synthetic construct
PANAVARVK

SEQ ID NO: 48859 - protein, 9 aa, synthetic construct
PANAVAKLR

SEQ ID NO: 48860 - protein, 9 aa, synthetic construct
PANAVIKVR

SEQ ID NO: 48861 - protein, 9 aa, synthetic construct
PANAVGKLK

SEQ ID NO: 48862 - protein, 9 aa, synthetic construct
PANAGVHLR

SEQ ID NO: 48863 - protein, 9 aa, synthetic construct
PANAGVHLH

SEQ ID NO: 48864 - protein, 9 aa, synthetic construct
PANAGVHVH

SEQ ID NO: 48865 - protein, 9 aa, synthetic construct
PANAGVRLR

SEQ ID NO: 48866 - protein, 9 aa, synthetic construct
PANAGVKLR

SEQ ID NO: 48867 - protein, 9 aa, synthetic construct
PANAGLHLR

SEQ ID NO: 48868 - protein, 9 aa, synthetic construct
PANAGLHLH

SEQ ID NO: 48869 - protein, 9 aa, synthetic construct
PANAGLHLK

SEQ ID NO: 48870 - protein, 9 aa, synthetic construct
PANAGLHLF

SEQ ID NO: 48871 - protein, 9 aa, synthetic construct
PANAGLHVY

SEQ ID NO: 48872 - protein, 9 aa, synthetic construct
PANAGLHVR

SEQ ID NO: 48873 - protein, 9 aa, synthetic construct
PANAGLHVF

SEQ ID NO: 48874 - protein, 9 aa, synthetic construct
PANAGLRLY

SEQ ID NO: 48875 - protein, 9 aa, synthetic construct
PANAGLRLR

SEQ ID NO: 48876 - protein, 9 aa, synthetic construct
PANAGLRLK

SEQ ID NO: 48877 - protein, 9 aa, synthetic construct
PANAGLRLF

SEQ ID NO: 48878 - protein, 9 aa, synthetic construct
PANAGLRVR

SEQ ID NO: 48879 - protein, 9 aa, synthetic construct
PANAGLRVK

SEQ ID NO: 48880 - protein, 9 aa, synthetic construct
PANAGLKLR

SEQ ID NO: 48881 - protein, 9 aa, synthetic construct
PANAGLKLK

SEQ ID NO: 48882 - protein, 9 aa, synthetic construct
PANAGLKVR

SEQ ID NO: 48883 - protein, 9 aa, synthetic construct
PANAGLKVK

SEQ ID NO: 48884 - protein, 9 aa, synthetic construct
PANAGARLR

SEQ ID NO: 48885 - protein, 9 aa, synthetic construct
PANAGARLK

SEQ ID NO: 48886 - protein, 9 aa, synthetic construct
PANAGAKLK

SEQ ID NO: 48887 - protein, 9 aa, synthetic construct
PANAGIRLR

SEQ ID NO: 48888 - protein, 9 aa, synthetic construct
PANAGIRLK

SEQ ID NO: 48889 - protein, 9 aa, synthetic construct
PANAGIRVK

SEQ ID NO: 48890 - protein, 9 aa, synthetic construct
PANAGGRLK

SEQ ID NO: 48891 - protein, 9 aa, synthetic construct
PAQGAVRLR

SEQ ID NO: 48892 - protein, 9 aa, synthetic construct
PAQGALRLR

SEQ ID NO: 48893 - protein, 9 aa, synthetic construct
PAQGALRLK

SEQ ID NO: 48894 - protein, 9 aa, synthetic construct
PAQGALRLF

SEQ ID NO: 48895 - protein, 9 aa, synthetic construct
PAQGALRVY

SEQ ID NO: 48896 - protein, 9 aa, synthetic construct
PAQGALRVR

SEQ ID NO: 48897 - protein, 9 aa, synthetic construct
PAQGALKLK

SEQ ID NO: 48898 - protein, 9 aa, synthetic construct
PAQGALKVK

SEQ ID NO: 48899 - protein, 9 aa, synthetic construct
PAQGAGRLR

SEQ ID NO: 48900 - protein, 9 aa, synthetic construct
PAQGAGRLK

SEQ ID NO: 48901 - protein, 9 aa, synthetic construct
PAQGTVRLR

SEQ ID NO: 48902 - protein, 9 aa, synthetic construct
PAQGTVRVR

SEQ ID NO: 48903 - protein, 9 aa, synthetic construct
PAQGTVRVK

SEQ ID NO: 48904 - protein, 9 aa, synthetic construct
PAQGTLRLR

SEQ ID NO: 48905 - protein, 9 aa, synthetic construct
PAQGTLRLF

SEQ ID NO: 48906 - protein, 9 aa, synthetic construct
PAQGTLRVR

SEQ ID NO: 48907 - protein, 9 aa, synthetic construct
PAQGTLRVK

SEQ ID NO: 48908 - protein, 9 aa, synthetic construct
PAQGTLKLR

SEQ ID NO: 48909 - protein, 9 aa, synthetic construct
PAQGTLKVR

SEQ ID NO: 48910 - protein, 9 aa, synthetic construct
PAQGTLKVK

SEQ ID NO: 48911 - protein, 9 aa, synthetic construct
PAQGTARVK

SEQ ID NO: 48912 - protein, 9 aa, synthetic construct
PAQGTAKVR

SEQ ID NO: 48913 - protein, 9 aa, synthetic construct
PAQGTIRLK

SEQ ID NO: 48914 - protein, 9 aa, synthetic construct
PAQGTIRVK

SEQ ID NO: 48915 - protein, 9 aa, synthetic construct
PAQGSVRVR

SEQ ID NO: 48916 - protein, 9 aa, synthetic construct
PAQGSLRLY

SEQ ID NO: 48917 - protein, 9 aa, synthetic construct
PAQGSLRLK

SEQ ID NO: 48918 - protein, 9 aa, synthetic construct
PAQGSLRVY

SEQ ID NO: 48919 - protein, 9 aa, synthetic construct
PAQGSLRVR

SEQ ID NO: 48920 - protein, 9 aa, synthetic construct
PAQGSLRVK

SEQ ID NO: 48921 - protein, 9 aa, synthetic construct
PAQGSAKLK

SEQ ID NO: 48922 - protein, 9 aa, synthetic construct
PAQGSIKVK

SEQ ID NO: 48923 - protein, 9 aa, synthetic construct
PAQGSGRLR

SEQ ID NO: 48924 - protein, 9 aa, synthetic construct
PAQGSGRLK

SEQ ID NO: 48925 - protein, 9 aa, synthetic construct
PAQGSGKLR

SEQ ID NO: 48926 - protein, 9 aa, synthetic construct
PAQGSGKLK

SEQ ID NO: 48927 - protein, 9 aa, synthetic construct
PAQGVVRVK

SEQ ID NO: 48928 - protein, 9 aa, synthetic construct
PAQGVLHLY

SEQ ID NO: 48929 - protein, 9 aa, synthetic construct
PAQGVLRLR

SEQ ID NO: 48930 - protein, 9 aa, synthetic construct
PAQGVLRLK

SEQ ID NO: 48931 - protein, 9 aa, synthetic construct
PAQGVLKVK

SEQ ID NO: 48932 - protein, 9 aa, synthetic construct
PAQGVARLR

SEQ ID NO: 48933 - protein, 9 aa, synthetic construct
PAQGVAKLK

SEQ ID NO: 48934 - protein, 9 aa, synthetic construct
PAQGVIRLK

SEQ ID NO: 48935 - protein, 9 aa, synthetic construct
PAQGVIRVR

SEQ ID NO: 48936 - protein, 9 aa, synthetic construct
PAQGGVHVH

SEQ ID NO: 48937 - protein, 9 aa, synthetic construct
PAQGGLRLY

SEQ ID NO: 48938 - protein, 9 aa, synthetic construct
PAQGGLRLR

SEQ ID NO: 48939 - protein, 9 aa, synthetic construct
PAQGGLRLK

SEQ ID NO: 48940 - protein, 9 aa, synthetic construct
PAQGGLRVY

SEQ ID NO: 48941 - protein, 9 aa, synthetic construct
PAQGGLRVR

SEQ ID NO: 48942 - protein, 9 aa, synthetic construct
PAQGGLRVH

SEQ ID NO: 48943 - protein, 9 aa, synthetic construct
PAQGGLKLR

SEQ ID NO: 48944 - protein, 9 aa, synthetic construct
PAQGGLKVK

SEQ ID NO: 48945 - protein, 9 aa, synthetic construct
PAQGGAKLR

SEQ ID NO: 48946 - protein, 9 aa, synthetic construct
PAQGGAKLK

SEQ ID NO: 48947 - protein, 9 aa, synthetic construct
PAQGGIRLR

SEQ ID NO: 48948 - protein, 9 aa, synthetic construct
PAQGGGRLR

SEQ ID NO: 48949 - protein, 9 aa, synthetic construct
PAQGGGKLK

SEQ ID NO: 48950 - protein, 9 aa, synthetic construct
PAQAALRLR

SEQ ID NO: 48951 - protein, 9 aa, synthetic construct
PAQAALRLK

SEQ ID NO: 48952 - protein, 9 aa, synthetic construct
PAQAALRLF

SEQ ID NO: 48953 - protein, 9 aa, synthetic construct
PAQAALRVR

SEQ ID NO: 48954 - protein, 9 aa, synthetic construct
PAQAALRVK

SEQ ID NO: 48955 - protein, 9 aa, synthetic construct
PAQAAARVK

SEQ ID NO: 48956 - protein, 9 aa, synthetic construct
PAQATVRVR

SEQ ID NO: 48957 - protein, 9 aa, synthetic construct
PAQATVRVK

SEQ ID NO: 48958 - protein, 9 aa, synthetic construct
PAQATLRLR

SEQ ID NO: 48959 - protein, 9 aa, synthetic construct
PAQATLRVY

SEQ ID NO: 48960 - protein, 9 aa, synthetic construct
PAQATLKLR

SEQ ID NO: 48961 - protein, 9 aa, synthetic construct
PAQATLKVY

SEQ ID NO: 48962 - protein, 9 aa, synthetic construct
PAQATAKVR

SEQ ID NO: 48963 - protein, 9 aa, synthetic construct
PAQATIRLK

SEQ ID NO: 48964 - protein, 9 aa, synthetic construct
PAQATGRLR

SEQ ID NO: 48965 - protein, 9 aa, synthetic construct
PAQATGKLR

SEQ ID NO: 48966 - protein, 9 aa, synthetic construct
PAQATGKVR

SEQ ID NO: 48967 - protein, 9 aa, synthetic construct
PAQATGKVK

SEQ ID NO: 48968 - protein, 9 aa, synthetic construct
PAQASVKLK

SEQ ID NO: 48969 - protein, 9 aa, synthetic construct
PAQASLRLR

SEQ ID NO: 48970 - protein, 9 aa, synthetic construct
PAQASLRLK

SEQ ID NO: 48971 - protein, 9 aa, synthetic construct
PAQASLRLF

SEQ ID NO: 48972 - protein, 9 aa, synthetic construct
PAQASLRVK

SEQ ID NO: 48973 - protein, 9 aa, synthetic construct
PAQASLKLR

SEQ ID NO: 48974 - protein, 9 aa, synthetic construct
PAQASLKLK

SEQ ID NO: 48975 - protein, 9 aa, synthetic construct
PAQASAKLK

SEQ ID NO: 48976 - protein, 9 aa, synthetic construct
PAQASAKVR

SEQ ID NO: 48977 - protein, 9 aa, synthetic construct
PAQASGRLK

SEQ ID NO: 48978 - protein, 9 aa, synthetic construct
PAQASGKLR

SEQ ID NO: 48979 - protein, 9 aa, synthetic construct
PAQASGKLK

SEQ ID NO: 48980 - protein, 9 aa, synthetic construct
PAQASGKVR

SEQ ID NO: 48981 - protein, 9 aa, synthetic construct
PAQAVVHLK

SEQ ID NO: 48982 - protein, 9 aa, synthetic construct
PAQAVLHLY

SEQ ID NO: 48983 - protein, 9 aa, synthetic construct
PAQAVLHLR

SEQ ID NO: 48984 - protein, 9 aa, synthetic construct
PAQAVLHLK

SEQ ID NO: 48985 - protein, 9 aa, synthetic construct
PAQAVLHLF

SEQ ID NO: 48986 - protein, 9 aa, synthetic construct
PAQAVLRLR

SEQ ID NO: 48987 - protein, 9 aa, synthetic construct
PAQAVLRLK

SEQ ID NO: 48988 - protein, 9 aa, synthetic construct
PAQAVLRLF

SEQ ID NO: 48989 - protein, 9 aa, synthetic construct
PAQAVLKLR

SEQ ID NO: 48990 - protein, 9 aa, synthetic construct
PAQAVLKLK

SEQ ID NO: 48991 - protein, 9 aa, synthetic construct
PAQAVARLR

SEQ ID NO: 48992 - protein, 9 aa, synthetic construct
PAQAVARVR

SEQ ID NO: 48993 - protein, 9 aa, synthetic construct
PAQAVARVK

SEQ ID NO: 48994 - protein, 9 aa, synthetic construct
PAQAVAKLR

SEQ ID NO: 48995 - protein, 9 aa, synthetic construct
PAQAVAKVK

SEQ ID NO: 48996 - protein, 9 aa, synthetic construct
PAQAVIKLR

SEQ ID NO: 48997 - protein, 9 aa, synthetic construct
PAQAVIKVR

SEQ ID NO: 48998 - protein, 9 aa, synthetic construct
PAQAVIKVK

SEQ ID NO: 48999 - protein, 9 aa, synthetic construct
PAQAVGRLK

SEQ ID NO: 49000 - protein, 9 aa, synthetic construct
PAQAGVHLF

SEQ ID NO: 49001 - protein, 9 aa, synthetic construct
PAQAGVHVH

SEQ ID NO: 49002 - protein, 9 aa, synthetic construct
PAQAGVRLR

SEQ ID NO: 49003 - protein, 9 aa, synthetic construct
PAQAGVRLK

SEQ ID NO: 49004 - protein, 9 aa, synthetic construct
PAQAGVRLF

SEQ ID NO: 49005 - protein, 9 aa, synthetic construct
PAQAGVKLK

SEQ ID NO: 49006 - protein, 9 aa, synthetic construct
PAQAGLHLY

SEQ ID NO: 49007 - protein, 9 aa, synthetic construct
PAQAGLHLR

SEQ ID NO: 49008 - protein, 9 aa, synthetic construct
PAQAGLHLH

SEQ ID NO: 49009 - protein, 9 aa, synthetic construct
PAQAGLHLK

SEQ ID NO: 49010 - protein, 9 aa, synthetic construct
PAQAGLHLF

SEQ ID NO: 49011 - protein, 9 aa, synthetic construct
PAQAGLHVY

SEQ ID NO: 49012 - protein, 9 aa, synthetic construct
PAQAGLHVR

SEQ ID NO: 49013 - protein, 9 aa, synthetic construct
PAQAGLHVK

SEQ ID NO: 49014 - protein, 9 aa, synthetic construct
PAQAGLHVF

SEQ ID NO: 49015 - protein, 9 aa, synthetic construct
PAQAGLRLY

SEQ ID NO: 49016 - protein, 9 aa, synthetic construct
PAQAGLRLR

SEQ ID NO: 49017 - protein, 9 aa, synthetic construct
PAQAGLRLH

SEQ ID NO: 49018 - protein, 9 aa, synthetic construct
PAQAGLRLK

SEQ ID NO: 49019 - protein, 9 aa, synthetic construct
PAQAGLRLF

SEQ ID NO: 49020 - protein, 9 aa, synthetic construct
PAQAGLRVR

SEQ ID NO: 49021 - protein, 9 aa, synthetic construct
PAQAGLRVH

SEQ ID NO: 49022 - protein, 9 aa, synthetic construct
PAQAGLRVK

SEQ ID NO: 49023 - protein, 9 aa, synthetic construct
PAQAGLKLR

SEQ ID NO: 49024 - protein, 9 aa, synthetic construct
PAQAGLKLK

SEQ ID NO: 49025 - protein, 9 aa, synthetic construct
PAQAGLKVR

SEQ ID NO: 49026 - protein, 9 aa, synthetic construct
PAQAGLKVK

SEQ ID NO: 49027 - protein, 9 aa, synthetic construct
PAQAGAKLR

SEQ ID NO: 49028 - protein, 9 aa, synthetic construct
PAQAGAKLK

SEQ ID NO: 49029 - protein, 9 aa, synthetic construct
PAQAGIRLR

SEQ ID NO: 49030 - protein, 9 aa, synthetic construct
PAQAGIRVR

SEQ ID NO: 49031 - protein, 9 aa, synthetic construct
PAQAGIKLK

SEQ ID NO: 49032 - protein, 9 aa, synthetic construct
PAQAGIKVK

SEQ ID NO: 49033 - protein, 9 aa, synthetic construct
PAQAGGRLR

SEQ ID NO: 49034 - protein, 9 aa, synthetic construct
PAQAGGRLK

SEQ ID NO: 49035 - protein, 9 aa, synthetic construct
PAQAGGKLK

SEQ ID NO: 49036 - protein, 9 aa, synthetic construct
PAPGAVRLR

SEQ ID NO: 49037 - protein, 9 aa, synthetic construct
PAPGALRLR

SEQ ID NO: 49038 - protein, 9 aa, synthetic construct
PAPGALRVY

SEQ ID NO: 49039 - protein, 9 aa, synthetic construct
PAPGALRVR

SEQ ID NO: 49040 - protein, 9 aa, synthetic construct
PAPGALKVK

SEQ ID NO: 49041 - protein, 9 aa, synthetic construct
PAPGAIRLR

SEQ ID NO: 49042 - protein, 9 aa, synthetic construct
PAPGAIKLR

SEQ ID NO: 49043 - protein, 9 aa, synthetic construct
PAPGTVRLR

SEQ ID NO: 49044 - protein, 9 aa, synthetic construct
PAPGTVRLK

SEQ ID NO: 49045 - protein, 9 aa, synthetic construct
PAPGTLRLR

SEQ ID NO: 49046 - protein, 9 aa, synthetic construct
PAPGTLRLK

SEQ ID NO: 49047 - protein, 9 aa, synthetic construct
PAPGTLRVY

SEQ ID NO: 49048 - protein, 9 aa, synthetic construct
PAPGTLRVH

SEQ ID NO: 49049 - protein, 9 aa, synthetic construct
PAPGTLRVK

SEQ ID NO: 49050 - protein, 9 aa, synthetic construct
PAPGTLKLK

SEQ ID NO: 49051 - protein, 9 aa, synthetic construct
PAPGTARLR

SEQ ID NO: 49052 - protein, 9 aa, synthetic construct
PAPGTARLK

SEQ ID NO: 49053 - protein, 9 aa, synthetic construct
PAPGTARVR

SEQ ID NO: 49054 - protein, 9 aa, synthetic construct
PAPGTARVK

SEQ ID NO: 49055 - protein, 9 aa, synthetic construct
PAPGTAKVR

SEQ ID NO: 49056 - protein, 9 aa, synthetic construct
PAPGTIRVR

SEQ ID NO: 49057 - protein, 9 aa, synthetic construct
PAPGTIKVK

SEQ ID NO: 49058 - protein, 9 aa, synthetic construct
PAPGSVHVH

SEQ ID NO: 49059 - protein, 9 aa, synthetic construct
PAPGSVRLK

SEQ ID NO: 49060 - protein, 9 aa, synthetic construct
PAPGSVRVR

SEQ ID NO: 49061 - protein, 9 aa, synthetic construct
PAPGSVKLK

SEQ ID NO: 49062 - protein, 9 aa, synthetic construct
PAPGSVKVR

SEQ ID NO: 49063 - protein, 9 aa, synthetic construct
PAPGSLRLR

SEQ ID NO: 49064 - protein, 9 aa, synthetic construct
PAPGSLRLK

SEQ ID NO: 49065 - protein, 9 aa, synthetic construct
PAPGSLRLF

SEQ ID NO: 49066 - protein, 9 aa, synthetic construct
PAPGSLRVR

SEQ ID NO: 49067 - protein, 9 aa, synthetic construct
PAPGSLRVK

SEQ ID NO: 49068 - protein, 9 aa, synthetic construct
PAPGSLKVR

SEQ ID NO: 49069 - protein, 9 aa, synthetic construct
PAPGSLKVK

SEQ ID NO: 49070 - protein, 9 aa, synthetic construct
PAPGSAKVR

SEQ ID NO: 49071 - protein, 9 aa, synthetic construct
PAPGSIRLR

SEQ ID NO: 49072 - protein, 9 aa, synthetic construct
PAPGSIRLK

SEQ ID NO: 49073 - protein, 9 aa, synthetic construct
PAPGSIRVK

SEQ ID NO: 49074 - protein, 9 aa, synthetic construct
PAPGSGRVR

SEQ ID NO: 49075 - protein, 9 aa, synthetic construct
PAPGVVRLR

SEQ ID NO: 49076 - protein, 9 aa, synthetic construct
PAPGVVRVR

SEQ ID NO: 49077 - protein, 9 aa, synthetic construct
PAPGVVKLR

SEQ ID NO: 49078 - protein, 9 aa, synthetic construct
PAPGVLRLR

SEQ ID NO: 49079 - protein, 9 aa, synthetic construct
PAPGVLRVK

SEQ ID NO: 49080 - protein, 9 aa, synthetic construct
PAPGVLKVK

SEQ ID NO: 49081 - protein, 9 aa, synthetic construct
PAPGVARLK

SEQ ID NO: 49082 - protein, 9 aa, synthetic construct
PAPGVAKLR

SEQ ID NO: 49083 - protein, 9 aa, synthetic construct
PAPGVAKVK

SEQ ID NO: 49084 - protein, 9 aa, synthetic construct
PAPGVIRLK

SEQ ID NO: 49085 - protein, 9 aa, synthetic construct
PAPGVIRVR

SEQ ID NO: 49086 - protein, 9 aa, synthetic construct
PAPGVIKVR

SEQ ID NO: 49087 - protein, 9 aa, synthetic construct
PAPGVGRLK

SEQ ID NO: 49088 - protein, 9 aa, synthetic construct
PAPGGVHVH

SEQ ID NO: 49089 - protein, 9 aa, synthetic construct
PAPGGVRLR

SEQ ID NO: 49090 - protein, 9 aa, synthetic construct
PAPGGVKVR

SEQ ID NO: 49091 - protein, 9 aa, synthetic construct
PAPGGLRLR

SEQ ID NO: 49092 - protein, 9 aa, synthetic construct
PAPGGLKLR

SEQ ID NO: 49093 - protein, 9 aa, synthetic construct
PAPGGLKVR

SEQ ID NO: 49094 - protein, 9 aa, synthetic construct
PAPGGARVR

SEQ ID NO: 49095 - protein, 9 aa, synthetic construct
PAPGGARVK

SEQ ID NO: 49096 - protein, 9 aa, synthetic construct
PAPGGAKLK

SEQ ID NO: 49097 - protein, 9 aa, synthetic construct
PAPGGAKVR

SEQ ID NO: 49098 - protein, 9 aa, synthetic construct
PAPGGIRLR

SEQ ID NO: 49099 - protein, 9 aa, synthetic construct
PAPGGIRVR

SEQ ID NO: 49100 - protein, 9 aa, synthetic construct
PAPGGIKVK

SEQ ID NO: 49101 - protein, 9 aa, synthetic construct
PAPGGGRLR

SEQ ID NO: 49102 - protein, 9 aa, synthetic construct
PAPGGGKVK

SEQ ID NO: 49103 - protein, 9 aa, synthetic construct
PAPAAVRLR

SEQ ID NO: 49104 - protein, 9 aa, synthetic construct
PAPAALHLY

SEQ ID NO: 49105 - protein, 9 aa, synthetic construct
PAPAALHLR

SEQ ID NO: 49106 - protein, 9 aa, synthetic construct
PAPAALHLK

SEQ ID NO: 49107 - protein, 9 aa, synthetic construct
PAPAALHLF

SEQ ID NO: 49108 - protein, 9 aa, synthetic construct
PAPAALHVY

SEQ ID NO: 49109 - protein, 9 aa, synthetic construct
PAPAALRLR

SEQ ID NO: 49110 - protein, 9 aa, synthetic construct
PAPAALRLK

SEQ ID NO: 49111 - protein, 9 aa, synthetic construct
PAPAALKLF

SEQ ID NO: 49112 - protein, 9 aa, synthetic construct
PAPAALKVR

SEQ ID NO: 49113 - protein, 9 aa, synthetic construct
PAPAAARVK

SEQ ID NO: 49114 - protein, 9 aa, synthetic construct
PAPAAGRLR

SEQ ID NO: 49115 - protein, 9 aa, synthetic construct
PAPATVRLR

SEQ ID NO: 49116 - protein, 9 aa, synthetic construct
PAPATVRLK

SEQ ID NO: 49117 - protein, 9 aa, synthetic construct
PAPATVRVR

SEQ ID NO: 49118 - protein, 9 aa, synthetic construct
PAPATLRVR

SEQ ID NO: 49119 - protein, 9 aa, synthetic construct
PAPATLRVK

SEQ ID NO: 49120 - protein, 9 aa, synthetic construct
PAPATARLR

SEQ ID NO: 49121 - protein, 9 aa, synthetic construct
PAPATIHLY

SEQ ID NO: 49122 - protein, 9 aa, synthetic construct
PAPATIHLH

SEQ ID NO: 49123 - protein, 9 aa, synthetic construct
PAPATIRVK

SEQ ID NO: 49124 - protein, 9 aa, synthetic construct
PAPASVHLF

SEQ ID NO: 49125 - protein, 9 aa, synthetic construct
PAPASVHVH

SEQ ID NO: 49126 - protein, 9 aa, synthetic construct
PAPASVKLK

SEQ ID NO: 49127 - protein, 9 aa, synthetic construct
PAPASLHLR

SEQ ID NO: 49128 - protein, 9 aa, synthetic construct
PAPASLHLF

SEQ ID NO: 49129 - protein, 9 aa, synthetic construct
PAPASLRLY

SEQ ID NO: 49130 - protein, 9 aa, synthetic construct
PAPASLRLK

SEQ ID NO: 49131 - protein, 9 aa, synthetic construct
PAPASLRLF

SEQ ID NO: 49132 - protein, 9 aa, synthetic construct
PAPASLRVY

SEQ ID NO: 49133 - protein, 9 aa, synthetic construct
PAPASLRVR

SEQ ID NO: 49134 - protein, 9 aa, synthetic construct
PAPASLKLK

SEQ ID NO: 49135 - protein, 9 aa, synthetic construct
PAPASARLR

SEQ ID NO: 49136 - protein, 9 aa, synthetic construct
PAPASAKLR

SEQ ID NO: 49137 - protein, 9 aa, synthetic construct
PAPASIRVR

SEQ ID NO: 49138 - protein, 9 aa, synthetic construct
PAPASIRVK

SEQ ID NO: 49139 - protein, 9 aa, synthetic construct
PAPASIKLR

SEQ ID NO: 49140 - protein, 9 aa, synthetic construct
PAPASGRLK

SEQ ID NO: 49141 - protein, 9 aa, synthetic construct
PAPASGRVR

SEQ ID NO: 49142 - protein, 9 aa, synthetic construct
PAPAVVHLF

SEQ ID NO: 49143 - protein, 9 aa, synthetic construct
PAPAVVRLR

SEQ ID NO: 49144 - protein, 9 aa, synthetic construct
PAPAVVKLK

SEQ ID NO: 49145 - protein, 9 aa, synthetic construct
PAPAVLHLY

SEQ ID NO: 49146 - protein, 9 aa, synthetic construct
PAPAVLHLR

SEQ ID NO: 49147 - protein, 9 aa, synthetic construct
PAPAVLHLH

SEQ ID NO: 49148 - protein, 9 aa, synthetic construct
PAPAVLHLK

SEQ ID NO: 49149 - protein, 9 aa, synthetic construct
PAPAVLHLF

SEQ ID NO: 49150 - protein, 9 aa, synthetic construct
PAPAVLHVY

SEQ ID NO: 49151 - protein, 9 aa, synthetic construct
PAPAVLHVR

SEQ ID NO: 49152 - protein, 9 aa, synthetic construct
PAPAVLHVH

SEQ ID NO: 49153 - protein, 9 aa, synthetic construct
PAPAVLHVF

SEQ ID NO: 49154 - protein, 9 aa, synthetic construct
PAPAVLRLY

SEQ ID NO: 49155 - protein, 9 aa, synthetic construct
PAPAVLRLF

SEQ ID NO: 49156 - protein, 9 aa, synthetic construct
PAPAVLRVY

SEQ ID NO: 49157 - protein, 9 aa, synthetic construct
PAPAVLRVR

SEQ ID NO: 49158 - protein, 9 aa, synthetic construct
PAPAVLRVF

SEQ ID NO: 49159 - protein, 9 aa, synthetic construct
PAPAVLKLR

SEQ ID NO: 49160 - protein, 9 aa, synthetic construct
PAPAVLKVR

SEQ ID NO: 49161 - protein, 9 aa, synthetic construct
PAPAVLKVK

SEQ ID NO: 49162 - protein, 9 aa, synthetic construct
PAPAVARLR

SEQ ID NO: 49163 - protein, 9 aa, synthetic construct
PAPAVARLK

SEQ ID NO: 49164 - protein, 9 aa, synthetic construct
PAPAVARVR

SEQ ID NO: 49165 - protein, 9 aa, synthetic construct
PAPAVARVK

SEQ ID NO: 49166 - protein, 9 aa, synthetic construct
PAPAVAKLR

SEQ ID NO: 49167 - protein, 9 aa, synthetic construct
PAPAVAKVK

SEQ ID NO: 49168 - protein, 9 aa, synthetic construct
PAPAVIKLR

SEQ ID NO: 49169 - protein, 9 aa, synthetic construct
PAPAVGRLR

SEQ ID NO: 49170 - protein, 9 aa, synthetic construct
PAPAVGRVR

SEQ ID NO: 49171 - protein, 9 aa, synthetic construct
PAPAVGKLR

SEQ ID NO: 49172 - protein, 9 aa, synthetic construct
PAPAGVHLK

SEQ ID NO: 49173 - protein, 9 aa, synthetic construct
PAPAGVHVH

SEQ ID NO: 49174 - protein, 9 aa, synthetic construct
PAPAGVRLR

SEQ ID NO: 49175 - protein, 9 aa, synthetic construct
PAPAGVRLH

SEQ ID NO: 49176 - protein, 9 aa, synthetic construct
PAPAGVRLK

SEQ ID NO: 49177 - protein, 9 aa, synthetic construct
PAPAGVRLF

SEQ ID NO: 49178 - protein, 9 aa, synthetic construct
PAPAGVRVR

SEQ ID NO: 49179 - protein, 9 aa, synthetic construct
PAPAGVRVK

SEQ ID NO: 49180 - protein, 9 aa, synthetic construct
PAPAGVKLR

SEQ ID NO: 49181 - protein, 9 aa, synthetic construct
PAPAGVKVR

SEQ ID NO: 49182 - protein, 9 aa, synthetic construct
PAPAGLHLY

SEQ ID NO: 49183 - protein, 9 aa, synthetic construct
PAPAGLHLR

SEQ ID NO: 49184 - protein, 9 aa, synthetic construct
PAPAGLHLH

SEQ ID NO: 49185 - protein, 9 aa, synthetic construct
PAPAGLHLK

SEQ ID NO: 49186 - protein, 9 aa, synthetic construct
PAPAGLHLF

SEQ ID NO: 49187 - protein, 9 aa, synthetic construct
PAPAGLHVY

SEQ ID NO: 49188 - protein, 9 aa, synthetic construct
PAPAGLHVR

SEQ ID NO: 49189 - protein, 9 aa, synthetic construct
PAPAGLHVH

SEQ ID NO: 49190 - protein, 9 aa, synthetic construct
PAPAGLHVK

SEQ ID NO: 49191 - protein, 9 aa, synthetic construct
PAPAGLHVF

SEQ ID NO: 49192 - protein, 9 aa, synthetic construct
PAPAGLRLY

SEQ ID NO: 49193 - protein, 9 aa, synthetic construct
PAPAGLRLR

SEQ ID NO: 49194 - protein, 9 aa, synthetic construct
PAPAGLRLK

SEQ ID NO: 49195 - protein, 9 aa, synthetic construct
PAPAGLRVY

SEQ ID NO: 49196 - protein, 9 aa, synthetic construct
PAPAGLRVR

SEQ ID NO: 49197 - protein, 9 aa, synthetic construct
PAPAGLRVH

SEQ ID NO: 49198 - protein, 9 aa, synthetic construct
PAPAGLKLR

SEQ ID NO: 49199 - protein, 9 aa, synthetic construct
PAPAGLKLH

SEQ ID NO: 49200 - protein, 9 aa, synthetic construct
PAPAGLKLK

SEQ ID NO: 49201 - protein, 9 aa, synthetic construct
PAPAGLKLF

SEQ ID NO: 49202 - protein, 9 aa, synthetic construct
PAPAGLKVR

SEQ ID NO: 49203 - protein, 9 aa, synthetic construct
PAPAGLKVK

SEQ ID NO: 49204 - protein, 9 aa, synthetic construct
PAPAGARLR

SEQ ID NO: 49205 - protein, 9 aa, synthetic construct
PAPAGAKLK

SEQ ID NO: 49206 - protein, 9 aa, synthetic construct
PAPAGIRLR

SEQ ID NO: 49207 - protein, 9 aa, synthetic construct
PAPAGIRVK

SEQ ID NO: 49208 - protein, 9 aa, synthetic construct
PAPAGIKLR

SEQ ID NO: 49209 - protein, 9 aa, synthetic construct
PAPAGIKLK

SEQ ID NO: 49210 - protein, 9 aa, synthetic construct
PAPAGIKVK

SEQ ID NO: 49211 - protein, 9 aa, synthetic construct
PAPAGGRLR

SEQ ID NO: 49212 - protein, 9 aa, synthetic construct
PAPAGGRLK

SEQ ID NO: 49213 - protein, 9 aa, synthetic construct
PAPAGGRVK

SEQ ID NO: 49214 - protein, 9 aa, synthetic construct
PVNGAVRLR

SEQ ID NO: 49215 - protein, 9 aa, synthetic construct
PVNGAVRLK

SEQ ID NO: 49216 - protein, 9 aa, synthetic construct
PVNGALRLR

SEQ ID NO: 49217 - protein, 9 aa, synthetic construct
PVNGALRLK

SEQ ID NO: 49218 - protein, 9 aa, synthetic construct
PVNGALRVR

SEQ ID NO: 49219 - protein, 9 aa, synthetic construct
PVNGALKLK

SEQ ID NO: 49220 - protein, 9 aa, synthetic construct
PVNGTVRVR

SEQ ID NO: 49221 - protein, 9 aa, synthetic construct
PVNGTLRVR

SEQ ID NO: 49222 - protein, 9 aa, synthetic construct
PVNGTIRVK

SEQ ID NO: 49223 - protein, 9 aa, synthetic construct
PVNGTGRVK

SEQ ID NO: 49224 - protein, 9 aa, synthetic construct
PVNGTGKLR

SEQ ID NO: 49225 - protein, 9 aa, synthetic construct
PVNGSVHVH

SEQ ID NO: 49226 - protein, 9 aa, synthetic construct
PVNGSLRLY

SEQ ID NO: 49227 - protein, 9 aa, synthetic construct
PVNGSLRLR

SEQ ID NO: 49228 - protein, 9 aa, synthetic construct
PVNGSLRLK

SEQ ID NO: 49229 - protein, 9 aa, synthetic construct
PVNGSLRLF

SEQ ID NO: 49230 - protein, 9 aa, synthetic construct
PVNGSLRVR

SEQ ID NO: 49231 - protein, 9 aa, synthetic construct
PVNGSLRVK

SEQ ID NO: 49232 - protein, 9 aa, synthetic construct
PVNGSLKLK

SEQ ID NO: 49233 - protein, 9 aa, synthetic construct
PVNGSARLR

SEQ ID NO: 49234 - protein, 9 aa, synthetic construct
PVNGSARLK

SEQ ID NO: 49235 - protein, 9 aa, synthetic construct
PVNGSARVR

SEQ ID NO: 49236 - protein, 9 aa, synthetic construct
PVNGSIRLK

SEQ ID NO: 49237 - protein, 9 aa, synthetic construct
PVNGSGRVR

SEQ ID NO: 49238 - protein, 9 aa, synthetic construct
PVNGVVHLF

SEQ ID NO: 49239 - protein, 9 aa, synthetic construct
PVNGVVRLR

SEQ ID NO: 49240 - protein, 9 aa, synthetic construct
PVNGVVRVK

SEQ ID NO: 49241 - protein, 9 aa, synthetic construct
PVNGVVKVR

SEQ ID NO: 49242 - protein, 9 aa, synthetic construct
PVNGVARVK

SEQ ID NO: 49243 - protein, 9 aa, synthetic construct
PVNGVAKLR

SEQ ID NO: 49244 - protein, 9 aa, synthetic construct
PVNGVAKLK

SEQ ID NO: 49245 - protein, 9 aa, synthetic construct
PVNGVAKVK

SEQ ID NO: 49246 - protein, 9 aa, synthetic construct
PVNGVIKVR

SEQ ID NO: 49247 - protein, 9 aa, synthetic construct
PVNGGVHVH

SEQ ID NO: 49248 - protein, 9 aa, synthetic construct
PVNGGLRLY

SEQ ID NO: 49249 - protein, 9 aa, synthetic construct
PVNGGLRLR

SEQ ID NO: 49250 - protein, 9 aa, synthetic construct
PVNGGLRVY

SEQ ID NO: 49251 - protein, 9 aa, synthetic construct
PVNGGLRVR

SEQ ID NO: 49252 - protein, 9 aa, synthetic construct
PVNGGLKLK

SEQ ID NO: 49253 - protein, 9 aa, synthetic construct
PVNGGLKVK

SEQ ID NO: 49254 - protein, 9 aa, synthetic construct
PVNGGARLR

SEQ ID NO: 49255 - protein, 9 aa, synthetic construct
PVNGGIRLK

SEQ ID NO: 49256 - protein, 9 aa, synthetic construct
PVNGGGKVK

SEQ ID NO: 49257 - protein, 9 aa, synthetic construct
PVNAALRLK

SEQ ID NO: 49258 - protein, 9 aa, synthetic construct
PVNAALKVR

SEQ ID NO: 49259 - protein, 9 aa, synthetic construct
PVNAALKVK

SEQ ID NO: 49260 - protein, 9 aa, synthetic construct
PVNAAIRVR

SEQ ID NO: 49261 - protein, 9 aa, synthetic construct
PVNAAIRVK

SEQ ID NO: 49262 - protein, 9 aa, synthetic construct
PVNAAIKLR

SEQ ID NO: 49263 - protein, 9 aa, synthetic construct
PVNAAGRLR

SEQ ID NO: 49264 - protein, 9 aa, synthetic construct
PVNATLHLH

SEQ ID NO: 49265 - protein, 9 aa, synthetic construct
PVNATLHVY

SEQ ID NO: 49266 - protein, 9 aa, synthetic construct
PVNATLRLR

SEQ ID NO: 49267 - protein, 9 aa, synthetic construct
PVNATLRLH

SEQ ID NO: 49268 - protein, 9 aa, synthetic construct
PVNATLRLK

SEQ ID NO: 49269 - protein, 9 aa, synthetic construct
PVNATLRVR

SEQ ID NO: 49270 - protein, 9 aa, synthetic construct
PVNATARLR

SEQ ID NO: 49271 - protein, 9 aa, synthetic construct
PVNATIRLK

SEQ ID NO: 49272 - protein, 9 aa, synthetic construct
PVNATIRVR

SEQ ID NO: 49273 - protein, 9 aa, synthetic construct
PVNATIKLR

SEQ ID NO: 49274 - protein, 9 aa, synthetic construct
PVNATIKLK

SEQ ID NO: 49275 - protein, 9 aa, synthetic construct
PVNASLRLR

SEQ ID NO: 49276 - protein, 9 aa, synthetic construct
PVNASLRLH

SEQ ID NO: 49277 - protein, 9 aa, synthetic construct
PVNASLRLK

SEQ ID NO: 49278 - protein, 9 aa, synthetic construct
PVNASLRLF

SEQ ID NO: 49279 - protein, 9 aa, synthetic construct
PVNASLRVR

SEQ ID NO: 49280 - protein, 9 aa, synthetic construct
PVNASLRVK

SEQ ID NO: 49281 - protein, 9 aa, synthetic construct
PVNASLKLK

SEQ ID NO: 49282 - protein, 9 aa, synthetic construct
PVNASLKVR

SEQ ID NO: 49283 - protein, 9 aa, synthetic construct
PVNASLKVK

SEQ ID NO: 49284 - protein, 9 aa, synthetic construct
PVNASAKLK

SEQ ID NO: 49285 - protein, 9 aa, synthetic construct
PVNASAKVR

SEQ ID NO: 49286 - protein, 9 aa, synthetic construct
PVNASIHLF

SEQ ID NO: 49287 - protein, 9 aa, synthetic construct
PVNASIKLK

SEQ ID NO: 49288 - protein, 9 aa, synthetic construct
PVNASGRVK

SEQ ID NO: 49289 - protein, 9 aa, synthetic construct
PVNAVVHVY

SEQ ID NO: 49290 - protein, 9 aa, synthetic construct
PVNAVVRLR

SEQ ID NO: 49291 - protein, 9 aa, synthetic construct
PVNAVVKVR

SEQ ID NO: 49292 - protein, 9 aa, synthetic construct
PVNAVLHLY

SEQ ID NO: 49293 - protein, 9 aa, synthetic construct
PVNAVLHLR

SEQ ID NO: 49294 - protein, 9 aa, synthetic construct
PVNAVLHLK

SEQ ID NO: 49295 - protein, 9 aa, synthetic construct
PVNAVLHLF

SEQ ID NO: 49296 - protein, 9 aa, synthetic construct
PVNAVLHVK

SEQ ID NO: 49297 - protein, 9 aa, synthetic construct
PVNAVLRLK

SEQ ID NO: 49298 - protein, 9 aa, synthetic construct
PVNAVARLY

SEQ ID NO: 49299 - protein, 9 aa, synthetic construct
PVNAVARLR

SEQ ID NO: 49300 - protein, 9 aa, synthetic construct
PVNAVARLK

SEQ ID NO: 49301 - protein, 9 aa, synthetic construct
PVNAVARVK

SEQ ID NO: 49302 - protein, 9 aa, synthetic construct
PVNAVAKLR

SEQ ID NO: 49303 - protein, 9 aa, synthetic construct
PVNAVIKVR

SEQ ID NO: 49304 - protein, 9 aa, synthetic construct
PVNAVGRLK

SEQ ID NO: 49305 - protein, 9 aa, synthetic construct
PVNAGVHLK

SEQ ID NO: 49306 - protein, 9 aa, synthetic construct
PVNAGVRLK

SEQ ID NO: 49307 - protein, 9 aa, synthetic construct
PVNAGLHLY

SEQ ID NO: 49308 - protein, 9 aa, synthetic construct
PVNAGLHLR

SEQ ID NO: 49309 - protein, 9 aa, synthetic construct
PVNAGLHLH

SEQ ID NO: 49310 - protein, 9 aa, synthetic construct
PVNAGLHLK

SEQ ID NO: 49311 - protein, 9 aa, synthetic construct
PVNAGLHLF

SEQ ID NO: 49312 - protein, 9 aa, synthetic construct
PVNAGLHVR

SEQ ID NO: 49313 - protein, 9 aa, synthetic construct
PVNAGLHVH

SEQ ID NO: 49314 - protein, 9 aa, synthetic construct
PVNAGLHVK

SEQ ID NO: 49315 - protein, 9 aa, synthetic construct
PVNAGLHVF

SEQ ID NO: 49316 - protein, 9 aa, synthetic construct
PVNAGLRLY

SEQ ID NO: 49317 - protein, 9 aa, synthetic construct
PVNAGLRLK

SEQ ID NO: 49318 - protein, 9 aa, synthetic construct
PVNAGLRVR

SEQ ID NO: 49319 - protein, 9 aa, synthetic construct
PVNAGLRVK

SEQ ID NO: 49320 - protein, 9 aa, synthetic construct
PVNAGARLR

SEQ ID NO: 49321 - protein, 9 aa, synthetic construct
PVNAGARLK

SEQ ID NO: 49322 - protein, 9 aa, synthetic construct
PVNAGAKLK

SEQ ID NO: 49323 - protein, 9 aa, synthetic construct
PVNAGIRLK

SEQ ID NO: 49324 - protein, 9 aa, synthetic construct
PVNAGIRVR

SEQ ID NO: 49325 - protein, 9 aa, synthetic construct
PVNAGIRVK

SEQ ID NO: 49326 - protein, 9 aa, synthetic construct
PVNAGGRLR

SEQ ID NO: 49327 - protein, 9 aa, synthetic construct
PVNAGGRVK

SEQ ID NO: 49328 - protein, 9 aa, synthetic construct
PVQGAVRLR

SEQ ID NO: 49329 - protein, 9 aa, synthetic construct
PVQGAVRLK

SEQ ID NO: 49330 - protein, 9 aa, synthetic construct
PVQGALHLY

SEQ ID NO: 49331 - protein, 9 aa, synthetic construct
PVQGALHLR

SEQ ID NO: 49332 - protein, 9 aa, synthetic construct
PVQGALHLH

SEQ ID NO: 49333 - protein, 9 aa, synthetic construct
PVQGALHLK

SEQ ID NO: 49334 - protein, 9 aa, synthetic construct
PVQGALHLF

SEQ ID NO: 49335 - protein, 9 aa, synthetic construct
PVQGALHVY

SEQ ID NO: 49336 - protein, 9 aa, synthetic construct
PVQGALHVR

SEQ ID NO: 49337 - protein, 9 aa, synthetic construct
PVQGALHVH

SEQ ID NO: 49338 - protein, 9 aa, synthetic construct
PVQGALHVK

SEQ ID NO: 49339 - protein, 9 aa, synthetic construct
PVQGALHVF

SEQ ID NO: 49340 - protein, 9 aa, synthetic construct
PVQGALRLR

SEQ ID NO: 49341 - protein, 9 aa, synthetic construct
PVQGALRLK

SEQ ID NO: 49342 - protein, 9 aa, synthetic construct
PVQGALRVR

SEQ ID NO: 49343 - protein, 9 aa, synthetic construct
PVQGALRVH

SEQ ID NO: 49344 - protein, 9 aa, synthetic construct
PVQGALKLR

SEQ ID NO: 49345 - protein, 9 aa, synthetic construct
PVQGALKLK

SEQ ID NO: 49346 - protein, 9 aa, synthetic construct
PVQGAARLR

SEQ ID NO: 49347 - protein, 9 aa, synthetic construct
PVQGAAKLR

SEQ ID NO: 49348 - protein, 9 aa, synthetic construct
PVQGAIRLR

SEQ ID NO: 49349 - protein, 9 aa, synthetic construct
PVQGAGRLK

SEQ ID NO: 49350 - protein, 9 aa, synthetic construct
PVQGAGKLR

SEQ ID NO: 49351 - protein, 9 aa, synthetic construct
PVQGTVRLK

SEQ ID NO: 49352 - protein, 9 aa, synthetic construct
PVQGTVRVR

SEQ ID NO: 49353 - protein, 9 aa, synthetic construct
PVQGTVRVK

SEQ ID NO: 49354 - protein, 9 aa, synthetic construct
PVQGTLHLF

SEQ ID NO: 49355 - protein, 9 aa, synthetic construct
PVQGTLHVY

SEQ ID NO: 49356 - protein, 9 aa, synthetic construct
PVQGTLHVR

SEQ ID NO: 49357 - protein, 9 aa, synthetic construct
PVQGTLHVH

SEQ ID NO: 49358 - protein, 9 aa, synthetic construct
PVQGTLHVK

SEQ ID NO: 49359 - protein, 9 aa, synthetic construct
PVQGTLHVF

SEQ ID NO: 49360 - protein, 9 aa, synthetic construct
PVQGTLRLR

SEQ ID NO: 49361 - protein, 9 aa, synthetic construct
PVQGTLRLF

SEQ ID NO: 49362 - protein, 9 aa, synthetic construct
PVQGTLRVR

SEQ ID NO: 49363 - protein, 9 aa, synthetic construct
PVQGTLRVK

SEQ ID NO: 49364 - protein, 9 aa, synthetic construct
PVQGTLKVR

SEQ ID NO: 49365 - protein, 9 aa, synthetic construct
PVQGTARLK

SEQ ID NO: 49366 - protein, 9 aa, synthetic construct
PVQGTARVK

SEQ ID NO: 49367 - protein, 9 aa, synthetic construct
PVQGTIRLR

SEQ ID NO: 49368 - protein, 9 aa, synthetic construct
PVQGTIRLK

SEQ ID NO: 49369 - protein, 9 aa, synthetic construct
PVQGTGKLR

SEQ ID NO: 49370 - protein, 9 aa, synthetic construct
PVQGSLHLH

SEQ ID NO: 49371 - protein, 9 aa, synthetic construct
PVQGSLHVH

SEQ ID NO: 49372 - protein, 9 aa, synthetic construct
PVQGSLHVF

SEQ ID NO: 49373 - protein, 9 aa, synthetic construct
PVQGSLRLR

SEQ ID NO: 49374 - protein, 9 aa, synthetic construct
PVQGSLRLH

SEQ ID NO: 49375 - protein, 9 aa, synthetic construct
PVQGSLRLK

SEQ ID NO: 49376 - protein, 9 aa, synthetic construct
PVQGSLRLF

SEQ ID NO: 49377 - protein, 9 aa, synthetic construct
PVQGSLRVR

SEQ ID NO: 49378 - protein, 9 aa, synthetic construct
PVQGSLRVK

SEQ ID NO: 49379 - protein, 9 aa, synthetic construct
PVQGSLKLR

SEQ ID NO: 49380 - protein, 9 aa, synthetic construct
PVQGSARVR

SEQ ID NO: 49381 - protein, 9 aa, synthetic construct
PVQGSAKLR

SEQ ID NO: 49382 - protein, 9 aa, synthetic construct
PVQGSAKLK

SEQ ID NO: 49383 - protein, 9 aa, synthetic construct
PVQGSAKVR

SEQ ID NO: 49384 - protein, 9 aa, synthetic construct
PVQGSIRLK

SEQ ID NO: 49385 - protein, 9 aa, synthetic construct
PVQGSGKLR

SEQ ID NO: 49386 - protein, 9 aa, synthetic construct
PVQGSGKLK

SEQ ID NO: 49387 - protein, 9 aa, synthetic construct
PVQGVVHLF

SEQ ID NO: 49388 - protein, 9 aa, synthetic construct
PVQGVVRLR

SEQ ID NO: 49389 - protein, 9 aa, synthetic construct
PVQGVLHLY

SEQ ID NO: 49390 - protein, 9 aa, synthetic construct
PVQGVLHLR

SEQ ID NO: 49391 - protein, 9 aa, synthetic construct
PVQGVLRVK

SEQ ID NO: 49392 - protein, 9 aa, synthetic construct
PVQGVLKLK

SEQ ID NO: 49393 - protein, 9 aa, synthetic construct
PVQGVARLR

SEQ ID NO: 49394 - protein, 9 aa, synthetic construct
PVQGVAKLR

SEQ ID NO: 49395 - protein, 9 aa, synthetic construct
PVQGVAKLK

SEQ ID NO: 49396 - protein, 9 aa, synthetic construct
PVQGVIRLR

SEQ ID NO: 49397 - protein, 9 aa, synthetic construct
PVQGGVHVH

SEQ ID NO: 49398 - protein, 9 aa, synthetic construct
PVQGGLHLR

SEQ ID NO: 49399 - protein, 9 aa, synthetic construct
PVQGGLHLH

SEQ ID NO: 49400 - protein, 9 aa, synthetic construct
PVQGGLHLK

SEQ ID NO: 49401 - protein, 9 aa, synthetic construct
PVQGGLHVR

SEQ ID NO: 49402 - protein, 9 aa, synthetic construct
PVQGGLHVF

SEQ ID NO: 49403 - protein, 9 aa, synthetic construct
PVQGGLRLR

SEQ ID NO: 49404 - protein, 9 aa, synthetic construct
PVQGGLRLK

SEQ ID NO: 49405 - protein, 9 aa, synthetic construct
PVQGGLRLF

SEQ ID NO: 49406 - protein, 9 aa, synthetic construct
PVQGGLRVY

SEQ ID NO: 49407 - protein, 9 aa, synthetic construct
PVQGGLRVR

SEQ ID NO: 49408 - protein, 9 aa, synthetic construct
PVQGGLRVH

SEQ ID NO: 49409 - protein, 9 aa, synthetic construct
PVQGGLKLK

SEQ ID NO: 49410 - protein, 9 aa, synthetic construct
PVQGGARLR

SEQ ID NO: 49411 - protein, 9 aa, synthetic construct
PVQGGARLK

SEQ ID NO: 49412 - protein, 9 aa, synthetic construct
PVQGGAKLR

SEQ ID NO: 49413 - protein, 9 aa, synthetic construct
PVQGGGHVK

SEQ ID NO: 49414 - protein, 9 aa, synthetic construct
PVQGGGRLR

SEQ ID NO: 49415 - protein, 9 aa, synthetic construct
PVQGGGKLK

SEQ ID NO: 49416 - protein, 9 aa, synthetic construct
PVQAALHVY

SEQ ID NO: 49417 - protein, 9 aa, synthetic construct
PVQAALHVH

SEQ ID NO: 49418 - protein, 9 aa, synthetic construct
PVQAALHVK

SEQ ID NO: 49419 - protein, 9 aa, synthetic construct
PVQAALHVF

SEQ ID NO: 49420 - protein, 9 aa, synthetic construct
PVQAALRLR

SEQ ID NO: 49421 - protein, 9 aa, synthetic construct
PVQAALRLK

SEQ ID NO: 49422 - protein, 9 aa, synthetic construct
PVQAALRLF

SEQ ID NO: 49423 - protein, 9 aa, synthetic construct
PVQAAAKLR

SEQ ID NO: 49424 - protein, 9 aa, synthetic construct
PVQATVRLK

SEQ ID NO: 49425 - protein, 9 aa, synthetic construct
PVQATVRVR

SEQ ID NO: 49426 - protein, 9 aa, synthetic construct
PVQATVRVK

SEQ ID NO: 49427 - protein, 9 aa, synthetic construct
PVQATLHVR

SEQ ID NO: 49428 - protein, 9 aa, synthetic construct
PVQATLRLY

SEQ ID NO: 49429 - protein, 9 aa, synthetic construct
PVQATLKVY

SEQ ID NO: 49430 - protein, 9 aa, synthetic construct
PVQATARLR

SEQ ID NO: 49431 - protein, 9 aa, synthetic construct
PVQATIRLK

SEQ ID NO: 49432 - protein, 9 aa, synthetic construct
PVQATGRLR

SEQ ID NO: 49433 - protein, 9 aa, synthetic construct
PVQATGRLK

SEQ ID NO: 49434 - protein, 9 aa, synthetic construct
PVQATGKLK

SEQ ID NO: 49435 - protein, 9 aa, synthetic construct
PVQASVHVH

SEQ ID NO: 49436 - protein, 9 aa, synthetic construct
PVQASLHLR

SEQ ID NO: 49437 - protein, 9 aa, synthetic construct
PVQASLHVY

SEQ ID NO: 49438 - protein, 9 aa, synthetic construct
PVQASLHVR

SEQ ID NO: 49439 - protein, 9 aa, synthetic construct
PVQASLHVK

SEQ ID NO: 49440 - protein, 9 aa, synthetic construct
PVQASLHVF

SEQ ID NO: 49441 - protein, 9 aa, synthetic construct
PVQASLRLY

SEQ ID NO: 49442 - protein, 9 aa, synthetic construct
PVQASLRLK

SEQ ID NO: 49443 - protein, 9 aa, synthetic construct
PVQASLRLF

SEQ ID NO: 49444 - protein, 9 aa, synthetic construct
PVQASLRVR

SEQ ID NO: 49445 - protein, 9 aa, synthetic construct
PVQASLRVK

SEQ ID NO: 49446 - protein, 9 aa, synthetic construct
PVQASLKLK

SEQ ID NO: 49447 - protein, 9 aa, synthetic construct
PVQASAKLK

SEQ ID NO: 49448 - protein, 9 aa, synthetic construct
PVQASGKLK

SEQ ID NO: 49449 - protein, 9 aa, synthetic construct
PVQAVLHLY

SEQ ID NO: 49450 - protein, 9 aa, synthetic construct
PVQAVLHLK

SEQ ID NO: 49451 - protein, 9 aa, synthetic construct
PVQAVLHLF

SEQ ID NO: 49452 - protein, 9 aa, synthetic construct
PVQAVLRLY

SEQ ID NO: 49453 - protein, 9 aa, synthetic construct
PVQAVLRLR

SEQ ID NO: 49454 - protein, 9 aa, synthetic construct
PVQAVLRLH

SEQ ID NO: 49455 - protein, 9 aa, synthetic construct
PVQAVLRVY

SEQ ID NO: 49456 - protein, 9 aa, synthetic construct
PVQAVLRVK

SEQ ID NO: 49457 - protein, 9 aa, synthetic construct
PVQAVARLY

SEQ ID NO: 49458 - protein, 9 aa, synthetic construct
PVQAVARLR

SEQ ID NO: 49459 - protein, 9 aa, synthetic construct
PVQAVARLH

SEQ ID NO: 49460 - protein, 9 aa, synthetic construct
PVQAVARLK

SEQ ID NO: 49461 - protein, 9 aa, synthetic construct
PVQAVARVY

SEQ ID NO: 49462 - protein, 9 aa, synthetic construct
PVQAVARVR

SEQ ID NO: 49463 - protein, 9 aa, synthetic construct
PVQAVARVK

SEQ ID NO: 49464 - protein, 9 aa, synthetic construct
PVQAVAKLR

SEQ ID NO: 49465 - protein, 9 aa, synthetic construct
PVQAVAKLK

SEQ ID NO: 49466 - protein, 9 aa, synthetic construct
PVQAVAKVK

SEQ ID NO: 49467 - protein, 9 aa, synthetic construct
PVQAVIRLR

SEQ ID NO: 49468 - protein, 9 aa, synthetic construct
PVQAVGKLR

SEQ ID NO: 49469 - protein, 9 aa, synthetic construct
PVQAGVHLR

SEQ ID NO: 49470 - protein, 9 aa, synthetic construct
PVQAGVHVH

SEQ ID NO: 49471 - protein, 9 aa, synthetic construct
PVQAGVRLK

SEQ ID NO: 49472 - protein, 9 aa, synthetic construct
PVQAGVKVR

SEQ ID NO: 49473 - protein, 9 aa, synthetic construct
PVQAGLHLY

SEQ ID NO: 49474 - protein, 9 aa, synthetic construct
PVQAGLHLR

SEQ ID NO: 49475 - protein, 9 aa, synthetic construct
PVQAGLHLH

SEQ ID NO: 49476 - protein, 9 aa, synthetic construct
PVQAGLHLK

SEQ ID NO: 49477 - protein, 9 aa, synthetic construct
PVQAGLHLF

SEQ ID NO: 49478 - protein, 9 aa, synthetic construct
PVQAGLHVY

SEQ ID NO: 49479 - protein, 9 aa, synthetic construct
PVQAGLHVR

SEQ ID NO: 49480 - protein, 9 aa, synthetic construct
PVQAGLHVH

SEQ ID NO: 49481 - protein, 9 aa, synthetic construct
PVQAGLHVK

SEQ ID NO: 49482 - protein, 9 aa, synthetic construct
PVQAGLHVF

SEQ ID NO: 49483 - protein, 9 aa, synthetic construct
PVQAGLRLY

SEQ ID NO: 49484 - protein, 9 aa, synthetic construct
PVQAGLRLR

SEQ ID NO: 49485 - protein, 9 aa, synthetic construct
PVQAGLRLK

SEQ ID NO: 49486 - protein, 9 aa, synthetic construct
PVQAGLRLF

SEQ ID NO: 49487 - protein, 9 aa, synthetic construct
PVQAGLRVR

SEQ ID NO: 49488 - protein, 9 aa, synthetic construct
PVQAGLRVH

SEQ ID NO: 49489 - protein, 9 aa, synthetic construct
PVQAGLRVK

SEQ ID NO: 49490 - protein, 9 aa, synthetic construct
PVQAGLKLR

SEQ ID NO: 49491 - protein, 9 aa, synthetic construct
PVQAGLKLH

SEQ ID NO: 49492 - protein, 9 aa, synthetic construct
PVQAGARLR

SEQ ID NO: 49493 - protein, 9 aa, synthetic construct
PVQAGARLK

SEQ ID NO: 49494 - protein, 9 aa, synthetic construct
PVQAGARVR

SEQ ID NO: 49495 - protein, 9 aa, synthetic construct
PVQAGAKLR

SEQ ID NO: 49496 - protein, 9 aa, synthetic construct
PVQAGAKLK

SEQ ID NO: 49497 - protein, 9 aa, synthetic construct
PVQAGAKVR

SEQ ID NO: 49498 - protein, 9 aa, synthetic construct
PVQAGAKVK

SEQ ID NO: 49499 - protein, 9 aa, synthetic construct
PVQAGIRLR

SEQ ID NO: 49500 - protein, 9 aa, synthetic construct
PVQAGIRVR

SEQ ID NO: 49501 - protein, 9 aa, synthetic construct
PVQAGIRVK

SEQ ID NO: 49502 - protein, 9 aa, synthetic construct
PVQAGIKLR

SEQ ID NO: 49503 - protein, 9 aa, synthetic construct
PVQAGGRLR

SEQ ID NO: 49504 - protein, 9 aa, synthetic construct
PVQAGGKLK

SEQ ID NO: 49505 - protein, 9 aa, synthetic construct
PVPGAVHLY

SEQ ID NO: 49506 - protein, 9 aa, synthetic construct
PVPGAVHLR

SEQ ID NO: 49507 - protein, 9 aa, synthetic construct
PVPGAVHLH

SEQ ID NO: 49508 - protein, 9 aa, synthetic construct
PVPGAVHLK

SEQ ID NO: 49509 - protein, 9 aa, synthetic construct
PVPGAVHLF

SEQ ID NO: 49510 - protein, 9 aa, synthetic construct
PVPGAVHVY

SEQ ID NO: 49511 - protein, 9 aa, synthetic construct
PVPGAVHVR

SEQ ID NO: 49512 - protein, 9 aa, synthetic construct
PVPGAVHVH

SEQ ID NO: 49513 - protein, 9 aa, synthetic construct
PVPGAVHVK

SEQ ID NO: 49514 - protein, 9 aa, synthetic construct
PVPGAVHVF

SEQ ID NO: 49515 - protein, 9 aa, synthetic construct
PVPGAVRLR

SEQ ID NO: 49516 - protein, 9 aa, synthetic construct
PVPGAVRLK

SEQ ID NO: 49517 - protein, 9 aa, synthetic construct
PVPGALRLK

SEQ ID NO: 49518 - protein, 9 aa, synthetic construct
PVPGALRVY

SEQ ID NO: 49519 - protein, 9 aa, synthetic construct
PVPGALRVR

SEQ ID NO: 49520 - protein, 9 aa, synthetic construct
PVPGALKVK

SEQ ID NO: 49521 - protein, 9 aa, synthetic construct
PVPGAARLR

SEQ ID NO: 49522 - protein, 9 aa, synthetic construct
PVPGAARVR

SEQ ID NO: 49523 - protein, 9 aa, synthetic construct
PVPGAARVK

SEQ ID NO: 49524 - protein, 9 aa, synthetic construct
PVPGAIRLR

SEQ ID NO: 49525 - protein, 9 aa, synthetic construct
PVPGAIRVK

SEQ ID NO: 49526 - protein, 9 aa, synthetic construct
PVPGAGHLY

SEQ ID NO: 49527 - protein, 9 aa, synthetic construct
PVPGAGHLR

SEQ ID NO: 49528 - protein, 9 aa, synthetic construct
PVPGAGHLH

SEQ ID NO: 49529 - protein, 9 aa, synthetic construct
PVPGAGHLK

SEQ ID NO: 49530 - protein, 9 aa, synthetic construct
PVPGAGHLF

SEQ ID NO: 49531 - protein, 9 aa, synthetic construct
PVPGAGHVY

SEQ ID NO: 49532 - protein, 9 aa, synthetic construct
PVPGAGHVR

SEQ ID NO: 49533 - protein, 9 aa, synthetic construct
PVPGAGHVH

SEQ ID NO: 49534 - protein, 9 aa, synthetic construct
PVPGAGHVK

SEQ ID NO: 49535 - protein, 9 aa, synthetic construct
PVPGAGHVF

SEQ ID NO: 49536 - protein, 9 aa, synthetic construct
PVPGAGRLR

SEQ ID NO: 49537 - protein, 9 aa, synthetic construct
PVPGAGRLK

SEQ ID NO: 49538 - protein, 9 aa, synthetic construct
PVPGTVRLR

SEQ ID NO: 49539 - protein, 9 aa, synthetic construct
PVPGTVRLK

SEQ ID NO: 49540 - protein, 9 aa, synthetic construct
PVPGTVRVK

SEQ ID NO: 49541 - protein, 9 aa, synthetic construct
PVPGTLHLF

SEQ ID NO: 49542 - protein, 9 aa, synthetic construct
PVPGTLRLK

SEQ ID NO: 49543 - protein, 9 aa, synthetic construct
PVPGTLRVR

SEQ ID NO: 49544 - protein, 9 aa, synthetic construct
PVPGTLRVH

SEQ ID NO: 49545 - protein, 9 aa, synthetic construct
PVPGTARLR

SEQ ID NO: 49546 - protein, 9 aa, synthetic construct
PVPGTARVK

SEQ ID NO: 49547 - protein, 9 aa, synthetic construct
PVPGTIRVK

SEQ ID NO: 49548 - protein, 9 aa, synthetic construct
PVPGTIKLR

SEQ ID NO: 49549 - protein, 9 aa, synthetic construct
PVPGSVHVH

SEQ ID NO: 49550 - protein, 9 aa, synthetic construct
PVPGSVRVR

SEQ ID NO: 49551 - protein, 9 aa, synthetic construct
PVPGSVKLK

SEQ ID NO: 49552 - protein, 9 aa, synthetic construct
PVPGSLRLR

SEQ ID NO: 49553 - protein, 9 aa, synthetic construct
PVPGSLRLK

SEQ ID NO: 49554 - protein, 9 aa, synthetic construct
PVPGSLRVR

SEQ ID NO: 49555 - protein, 9 aa, synthetic construct
PVPGSLKLK

SEQ ID NO: 49556 - protein, 9 aa, synthetic construct
PVPGSLKVR

SEQ ID NO: 49557 - protein, 9 aa, synthetic construct
PVPGSLKVK

SEQ ID NO: 49558 - protein, 9 aa, synthetic construct
PVPGSARLR

SEQ ID NO: 49559 - protein, 9 aa, synthetic construct
PVPGSARLK

SEQ ID NO: 49560 - protein, 9 aa, synthetic construct
PVPGSIRLK

SEQ ID NO: 49561 - protein, 9 aa, synthetic construct
PVPGSIKVR

SEQ ID NO: 49562 - protein, 9 aa, synthetic construct
PVPGSGRLR

SEQ ID NO: 49563 - protein, 9 aa, synthetic construct
PVPGSGRLK

SEQ ID NO: 49564 - protein, 9 aa, synthetic construct
PVPGSGKLK

SEQ ID NO: 49565 - protein, 9 aa, synthetic construct
PVPGSGKVK

SEQ ID NO: 49566 - protein, 9 aa, synthetic construct
PVPGVVKLR

SEQ ID NO: 49567 - protein, 9 aa, synthetic construct
PVPGVLHLY

SEQ ID NO: 49568 - protein, 9 aa, synthetic construct
PVPGVLHLR

SEQ ID NO: 49569 - protein, 9 aa, synthetic construct
PVPGVLHVH

SEQ ID NO: 49570 - protein, 9 aa, synthetic construct
PVPGVLRLR

SEQ ID NO: 49571 - protein, 9 aa, synthetic construct
PVPGVLRLH

SEQ ID NO: 49572 - protein, 9 aa, synthetic construct
PVPGVLRLK

SEQ ID NO: 49573 - protein, 9 aa, synthetic construct
PVPGVLRLF

SEQ ID NO: 49574 - protein, 9 aa, synthetic construct
PVPGVLRVK

SEQ ID NO: 49575 - protein, 9 aa, synthetic construct
PVPGVLKVK

SEQ ID NO: 49576 - protein, 9 aa, synthetic construct
PVPGVARLR

SEQ ID NO: 49577 - protein, 9 aa, synthetic construct
PVPGVARLH

SEQ ID NO: 49578 - protein, 9 aa, synthetic construct
PVPGVARLK

SEQ ID NO: 49579 - protein, 9 aa, synthetic construct
PVPGVAKLR

SEQ ID NO: 49580 - protein, 9 aa, synthetic construct
PVPGVAKLK

SEQ ID NO: 49581 - protein, 9 aa, synthetic construct
PVPGVAKVK

SEQ ID NO: 49582 - protein, 9 aa, synthetic construct
PVPGVIKVR

SEQ ID NO: 49583 - protein, 9 aa, synthetic construct
PVPGVGRLR

SEQ ID NO: 49584 - protein, 9 aa, synthetic construct
PVPGVGRLK

SEQ ID NO: 49585 - protein, 9 aa, synthetic construct
PVPGVGRVR

SEQ ID NO: 49586 - protein, 9 aa, synthetic construct
PVPGVGKVK

SEQ ID NO: 49587 - protein, 9 aa, synthetic construct
PVPGGVHVH

SEQ ID NO: 49588 - protein, 9 aa, synthetic construct
PVPGGVRLR

SEQ ID NO: 49589 - protein, 9 aa, synthetic construct
PVPGGVRVR

SEQ ID NO: 49590 - protein, 9 aa, synthetic construct
PVPGGVKLK

SEQ ID NO: 49591 - protein, 9 aa, synthetic construct
PVPGGLHVF

SEQ ID NO: 49592 - protein, 9 aa, synthetic construct
PVPGGLRLR

SEQ ID NO: 49593 - protein, 9 aa, synthetic construct
PVPGGLRLK

SEQ ID NO: 49594 - protein, 9 aa, synthetic construct
PVPGGLRVY

SEQ ID NO: 49595 - protein, 9 aa, synthetic construct
PVPGGLRVR

SEQ ID NO: 49596 - protein, 9 aa, synthetic construct
PVPGGLRVH

SEQ ID NO: 49597 - protein, 9 aa, synthetic construct
PVPGGLRVK

SEQ ID NO: 49598 - protein, 9 aa, synthetic construct
PVPGGLKLR

SEQ ID NO: 49599 - protein, 9 aa, synthetic construct
PVPGGLKLK

SEQ ID NO: 49600 - protein, 9 aa, synthetic construct
PVPGGLKVR

SEQ ID NO: 49601 - protein, 9 aa, synthetic construct
PVPGGLKVK

SEQ ID NO: 49602 - protein, 9 aa, synthetic construct
PVPGGARLK

SEQ ID NO: 49603 - protein, 9 aa, synthetic construct
PVPGGARVR

SEQ ID NO: 49604 - protein, 9 aa, synthetic construct
PVPGGAKVK

SEQ ID NO: 49605 - protein, 9 aa, synthetic construct
PVPGGGRLR

SEQ ID NO: 49606 - protein, 9 aa, synthetic construct
PVPAAVHVY

SEQ ID NO: 49607 - protein, 9 aa, synthetic construct
PVPAAVHVR

SEQ ID NO: 49608 - protein, 9 aa, synthetic construct
PVPAAVHVK

SEQ ID NO: 49609 - protein, 9 aa, synthetic construct
PVPAAVHVF

SEQ ID NO: 49610 - protein, 9 aa, synthetic construct
PVPAAVRLR

SEQ ID NO: 49611 - protein, 9 aa, synthetic construct
PVPAALRLR

SEQ ID NO: 49612 - protein, 9 aa, synthetic construct
PVPAALRLK

SEQ ID NO: 49613 - protein, 9 aa, synthetic construct
PVPAALRVY

SEQ ID NO: 49614 - protein, 9 aa, synthetic construct
PVPAALRVR

SEQ ID NO: 49615 - protein, 9 aa, synthetic construct
PVPAALKVR

SEQ ID NO: 49616 - protein, 9 aa, synthetic construct
PVPAALKVK

SEQ ID NO: 49617 - protein, 9 aa, synthetic construct
PVPAAGHVY

SEQ ID NO: 49618 - protein, 9 aa, synthetic construct
PVPAAGHVR

SEQ ID NO: 49619 - protein, 9 aa, synthetic construct
PVPAAGHVK

SEQ ID NO: 49620 - protein, 9 aa, synthetic construct
PVPAAGHVF

SEQ ID NO: 49621 - protein, 9 aa, synthetic construct
PVPAAGRLR

SEQ ID NO: 49622 - protein, 9 aa, synthetic construct
PVPAAGRLK

SEQ ID NO: 49623 - protein, 9 aa, synthetic construct
PVPAAGKLK

SEQ ID NO: 49624 - protein, 9 aa, synthetic construct
PVPATVKVR

SEQ ID NO: 49625 - protein, 9 aa, synthetic construct
PVPATLHLY

SEQ ID NO: 49626 - protein, 9 aa, synthetic construct
PVPATLRVR

SEQ ID NO: 49627 - protein, 9 aa, synthetic construct
PVPATLRVK

SEQ ID NO: 49628 - protein, 9 aa, synthetic construct
PVPATLKVR

SEQ ID NO: 49629 - protein, 9 aa, synthetic construct
PVPATARLR

SEQ ID NO: 49630 - protein, 9 aa, synthetic construct
PVPATARLK

SEQ ID NO: 49631 - protein, 9 aa, synthetic construct
PVPATIRVK

SEQ ID NO: 49632 - protein, 9 aa, synthetic construct
PVPATGKVK

SEQ ID NO: 49633 - protein, 9 aa, synthetic construct
PVPASVHVH

SEQ ID NO: 49634 - protein, 9 aa, synthetic construct
PVPASVRLR

SEQ ID NO: 49635 - protein, 9 aa, synthetic construct
PVPASVRVH

SEQ ID NO: 49636 - protein, 9 aa, synthetic construct
PVPASVKVR

SEQ ID NO: 49637 - protein, 9 aa, synthetic construct
PVPASLHLR

SEQ ID NO: 49638 - protein, 9 aa, synthetic construct
PVPASLHLK

SEQ ID NO: 49639 - protein, 9 aa, synthetic construct
PVPASLHLF

SEQ ID NO: 49640 - protein, 9 aa, synthetic construct
PVPASLRLY

SEQ ID NO: 49641 - protein, 9 aa, synthetic construct
PVPASLRLK

SEQ ID NO: 49642 - protein, 9 aa, synthetic construct
PVPASLRLF

SEQ ID NO: 49643 - protein, 9 aa, synthetic construct
PVPASLRVY

SEQ ID NO: 49644 - protein, 9 aa, synthetic construct
PVPASLRVR

SEQ ID NO: 49645 - protein, 9 aa, synthetic construct
PVPASLRVK

SEQ ID NO: 49646 - protein, 9 aa, synthetic construct
PVPASLKLR

SEQ ID NO: 49647 - protein, 9 aa, synthetic construct
PVPASLKLK

SEQ ID NO: 49648 - protein, 9 aa, synthetic construct
PVPASLKVR

SEQ ID NO: 49649 - protein, 9 aa, synthetic construct
PVPASLKVK

SEQ ID NO: 49650 - protein, 9 aa, synthetic construct
PVPASARLR

SEQ ID NO: 49651 - protein, 9 aa, synthetic construct
PVPASAKVR

SEQ ID NO: 49652 - protein, 9 aa, synthetic construct
PVPASIRLR

SEQ ID NO: 49653 - protein, 9 aa, synthetic construct
PVPASIRVR

SEQ ID NO: 49654 - protein, 9 aa, synthetic construct
PVPASIKLR

SEQ ID NO: 49655 - protein, 9 aa, synthetic construct
PVPASIKVR

SEQ ID NO: 49656 - protein, 9 aa, synthetic construct
PVPASIKVK

SEQ ID NO: 49657 - protein, 9 aa, synthetic construct
PVPASGRVR

SEQ ID NO: 49658 - protein, 9 aa, synthetic construct
PVPASGKVR

SEQ ID NO: 49659 - protein, 9 aa, synthetic construct
PVPAVLHLY

SEQ ID NO: 49660 - protein, 9 aa, synthetic construct
PVPAVLHLR

SEQ ID NO: 49661 - protein, 9 aa, synthetic construct
PVPAVLHLF

SEQ ID NO: 49662 - protein, 9 aa, synthetic construct
PVPAVLHVY

SEQ ID NO: 49663 - protein, 9 aa, synthetic construct
PVPAVLHVR

SEQ ID NO: 49664 - protein, 9 aa, synthetic construct
PVPAVLHVH

SEQ ID NO: 49665 - protein, 9 aa, synthetic construct
PVPAVLHVK

SEQ ID NO: 49666 - protein, 9 aa, synthetic construct
PVPAVLHVF

SEQ ID NO: 49667 - protein, 9 aa, synthetic construct
PVPAVLRLY

SEQ ID NO: 49668 - protein, 9 aa, synthetic construct
PVPAVLRLR

SEQ ID NO: 49669 - protein, 9 aa, synthetic construct
PVPAVLRVY

SEQ ID NO: 49670 - protein, 9 aa, synthetic construct
PVPAVLKLR

SEQ ID NO: 49671 - protein, 9 aa, synthetic construct
PVPAVARLR

SEQ ID NO: 49672 - protein, 9 aa, synthetic construct
PVPAVARLK

SEQ ID NO: 49673 - protein, 9 aa, synthetic construct
PVPAVARVR

SEQ ID NO: 49674 - protein, 9 aa, synthetic construct
PVPAVARVK

SEQ ID NO: 49675 - protein, 9 aa, synthetic construct
PVPAVAKLR

SEQ ID NO: 49676 - protein, 9 aa, synthetic construct
PVPAVAKVR

SEQ ID NO: 49677 - protein, 9 aa, synthetic construct
PVPAVAKVK

SEQ ID NO: 49678 - protein, 9 aa, synthetic construct
PVPAVIRLK

SEQ ID NO: 49679 - protein, 9 aa, synthetic construct
PVPAVIKLR

SEQ ID NO: 49680 - protein, 9 aa, synthetic construct
PVPAVGRVR

SEQ ID NO: 49681 - protein, 9 aa, synthetic construct
PVPAVGRVK

SEQ ID NO: 49682 - protein, 9 aa, synthetic construct
PVPAGVHLY

SEQ ID NO: 49683 - protein, 9 aa, synthetic construct
PVPAGVHLF

SEQ ID NO: 49684 - protein, 9 aa, synthetic construct
PVPAGVHVY

SEQ ID NO: 49685 - protein, 9 aa, synthetic construct
PVPAGVHVR

SEQ ID NO: 49686 - protein, 9 aa, synthetic construct
PVPAGVHVH

SEQ ID NO: 49687 - protein, 9 aa, synthetic construct
PVPAGVHVK

SEQ ID NO: 49688 - protein, 9 aa, synthetic construct
PVPAGVHVF

SEQ ID NO: 49689 - protein, 9 aa, synthetic construct
PVPAGVRLR

SEQ ID NO: 49690 - protein, 9 aa, synthetic construct
PVPAGVRLK

SEQ ID NO: 49691 - protein, 9 aa, synthetic construct
PVPAGVKLK

SEQ ID NO: 49692 - protein, 9 aa, synthetic construct
PVPAGLHLY

SEQ ID NO: 49693 - protein, 9 aa, synthetic construct
PVPAGLHLR

SEQ ID NO: 49694 - protein, 9 aa, synthetic construct
PVPAGLHLH

SEQ ID NO: 49695 - protein, 9 aa, synthetic construct
PVPAGLHLK

SEQ ID NO: 49696 - protein, 9 aa, synthetic construct
PVPAGLHLF

SEQ ID NO: 49697 - protein, 9 aa, synthetic construct
PVPAGLHVR

SEQ ID NO: 49698 - protein, 9 aa, synthetic construct
PVPAGLHVF

SEQ ID NO: 49699 - protein, 9 aa, synthetic construct
PVPAGLRLY

SEQ ID NO: 49700 - protein, 9 aa, synthetic construct
PVPAGLRLR

SEQ ID NO: 49701 - protein, 9 aa, synthetic construct
PVPAGLRLH

SEQ ID NO: 49702 - protein, 9 aa, synthetic construct
PVPAGLRLF

SEQ ID NO: 49703 - protein, 9 aa, synthetic construct
PVPAGLRVY

SEQ ID NO: 49704 - protein, 9 aa, synthetic construct
PVPAGLRVR

SEQ ID NO: 49705 - protein, 9 aa, synthetic construct
PVPAGLRVF

SEQ ID NO: 49706 - protein, 9 aa, synthetic construct
PVPAGLKLR

SEQ ID NO: 49707 - protein, 9 aa, synthetic construct
PVPAGLKLK

SEQ ID NO: 49708 - protein, 9 aa, synthetic construct
PVPAGLKVR

SEQ ID NO: 49709 - protein, 9 aa, synthetic construct
PVPAGLKVK

SEQ ID NO: 49710 - protein, 9 aa, synthetic construct
PVPAGARLR

SEQ ID NO: 49711 - protein, 9 aa, synthetic construct
PVPAGARLK

SEQ ID NO: 49712 - protein, 9 aa, synthetic construct
PVPAGIRLR

SEQ ID NO: 49713 - protein, 9 aa, synthetic construct
PVPAGIRLK

SEQ ID NO: 49714 - protein, 9 aa, synthetic construct
PVPAGIRVK

SEQ ID NO: 49715 - protein, 9 aa, synthetic construct
PVPAGIKLK

SEQ ID NO: 49716 - protein, 9 aa, synthetic construct
PVPAGIKVK

SEQ ID NO: 49717 - protein, 9 aa, synthetic construct
PVPAGGHLY

SEQ ID NO: 49718 - protein, 9 aa, synthetic construct
PVPAGGHLR

SEQ ID NO: 49719 - protein, 9 aa, synthetic construct
PVPAGGHLH

SEQ ID NO: 49720 - protein, 9 aa, synthetic construct
PVPAGGHLK

SEQ ID NO: 49721 - protein, 9 aa, synthetic construct
PVPAGGHLF

SEQ ID NO: 49722 - protein, 9 aa, synthetic construct
PVPAGGHVY

SEQ ID NO: 49723 - protein, 9 aa, synthetic construct
PVPAGGHVR

SEQ ID NO: 49724 - protein, 9 aa, synthetic construct
PVPAGGHVH

SEQ ID NO: 49725 - protein, 9 aa, synthetic construct
PVPAGGHVK

SEQ ID NO: 49726 - protein, 9 aa, synthetic construct
PVPAGGHVF

SEQ ID NO: 49727 - protein, 9 aa, synthetic construct
PVPAGGRLK

SEQ ID NO: 49728 - protein, 9 aa, synthetic construct
PINGAVRLR

SEQ ID NO: 49729 - protein, 9 aa, synthetic construct
PINGAVRLK

SEQ ID NO: 49730 - protein, 9 aa, synthetic construct
PINGAVRVR

SEQ ID NO: 49731 - protein, 9 aa, synthetic construct
PINGALHVF

SEQ ID NO: 49732 - protein, 9 aa, synthetic construct
PINGALRLR

SEQ ID NO: 49733 - protein, 9 aa, synthetic construct
PINGALRLK

SEQ ID NO: 49734 - protein, 9 aa, synthetic construct
PINGALRVY

SEQ ID NO: 49735 - protein, 9 aa, synthetic construct
PINGALRVR

SEQ ID NO: 49736 - protein, 9 aa, synthetic construct
PINGAARLR

SEQ ID NO: 49737 - protein, 9 aa, synthetic construct
PINGAIRLR

SEQ ID NO: 49738 - protein, 9 aa, synthetic construct
PINGAIRVR

SEQ ID NO: 49739 - protein, 9 aa, synthetic construct
PINGAIKVK

SEQ ID NO: 49740 - protein, 9 aa, synthetic construct
PINGAGRLK

SEQ ID NO: 49741 - protein, 9 aa, synthetic construct
PINGAGKVR

SEQ ID NO: 49742 - protein, 9 aa, synthetic construct
PINGTVRLK

SEQ ID NO: 49743 - protein, 9 aa, synthetic construct
PINGTVRVK

SEQ ID NO: 49744 - protein, 9 aa, synthetic construct
PINGTVKVR

SEQ ID NO: 49745 - protein, 9 aa, synthetic construct
PINGTLKVR

SEQ ID NO: 49746 - protein, 9 aa, synthetic construct
PINGTARLR

SEQ ID NO: 49747 - protein, 9 aa, synthetic construct
PINGTIRLK

SEQ ID NO: 49748 - protein, 9 aa, synthetic construct
PINGTIRVR

SEQ ID NO: 49749 - protein, 9 aa, synthetic construct
PINGTIKLR

SEQ ID NO: 49750 - protein, 9 aa, synthetic construct
PINGTIKVK

SEQ ID NO: 49751 - protein, 9 aa, synthetic construct
PINGTGRVR

SEQ ID NO: 49752 - protein, 9 aa, synthetic construct
PINGSVRLR

SEQ ID NO: 49753 - protein, 9 aa, synthetic construct
PINGSVRLK

SEQ ID NO: 49754 - protein, 9 aa, synthetic construct
PINGSVRVR

SEQ ID NO: 49755 - protein, 9 aa, synthetic construct
PINGSVKVR

SEQ ID NO: 49756 - protein, 9 aa, synthetic construct
PINGSLRLR

SEQ ID NO: 49757 - protein, 9 aa, synthetic construct
PINGSLRLK

SEQ ID NO: 49758 - protein, 9 aa, synthetic construct
PINGSLKLR

SEQ ID NO: 49759 - protein, 9 aa, synthetic construct
PINGSLKLK

SEQ ID NO: 49760 - protein, 9 aa, synthetic construct
PINGSLKVR

SEQ ID NO: 49761 - protein, 9 aa, synthetic construct
PINGSARLR

SEQ ID NO: 49762 - protein, 9 aa, synthetic construct
PINGSARLK

SEQ ID NO: 49763 - protein, 9 aa, synthetic construct
PINGSIRLK

SEQ ID NO: 49764 - protein, 9 aa, synthetic construct
PINGSIKLR

SEQ ID NO: 49765 - protein, 9 aa, synthetic construct
PINGSIKVK

SEQ ID NO: 49766 - protein, 9 aa, synthetic construct
PINGSGRVK

SEQ ID NO: 49767 - protein, 9 aa, synthetic construct
PINGSGKVR

SEQ ID NO: 49768 - protein, 9 aa, synthetic construct
PINGVVKVR

SEQ ID NO: 49769 - protein, 9 aa, synthetic construct
PINGVLHLY

SEQ ID NO: 49770 - protein, 9 aa, synthetic construct
PINGVLHLF

SEQ ID NO: 49771 - protein, 9 aa, synthetic construct
PINGVLRLR

SEQ ID NO: 49772 - protein, 9 aa, synthetic construct
PINGVLRLK

SEQ ID NO: 49773 - protein, 9 aa, synthetic construct
PINGVLRVR

SEQ ID NO: 49774 - protein, 9 aa, synthetic construct
PINGVLKVR

SEQ ID NO: 49775 - protein, 9 aa, synthetic construct
PINGVAKLR

SEQ ID NO: 49776 - protein, 9 aa, synthetic construct
PINGVAKVK

SEQ ID NO: 49777 - protein, 9 aa, synthetic construct
PINGVIRVR

SEQ ID NO: 49778 - protein, 9 aa, synthetic construct
PINGVIKVR

SEQ ID NO: 49779 - protein, 9 aa, synthetic construct
PINGVGRLR

SEQ ID NO: 49780 - protein, 9 aa, synthetic construct
PINGVGRLK

SEQ ID NO: 49781 - protein, 9 aa, synthetic construct
PINGVGKLK

SEQ ID NO: 49782 - protein, 9 aa, synthetic construct
PINGVGKVK

SEQ ID NO: 49783 - protein, 9 aa, synthetic construct
PINGGVHVH

SEQ ID NO: 49784 - protein, 9 aa, synthetic construct
PINGGVRLR

SEQ ID NO: 49785 - protein, 9 aa, synthetic construct
PINGGVRLK

SEQ ID NO: 49786 - protein, 9 aa, synthetic construct
PINGGVRVR

SEQ ID NO: 49787 - protein, 9 aa, synthetic construct
PINGGLHLY

SEQ ID NO: 49788 - protein, 9 aa, synthetic construct
PINGGLRLY

SEQ ID NO: 49789 - protein, 9 aa, synthetic construct
PINGGLRLR

SEQ ID NO: 49790 - protein, 9 aa, synthetic construct
PINGGLRVY

SEQ ID NO: 49791 - protein, 9 aa, synthetic construct
PINGGLRVH

SEQ ID NO: 49792 - protein, 9 aa, synthetic construct
PINGGLRVK

SEQ ID NO: 49793 - protein, 9 aa, synthetic construct
PINGGLKVR

SEQ ID NO: 49794 - protein, 9 aa, synthetic construct
PINGGARLR

SEQ ID NO: 49795 - protein, 9 aa, synthetic construct
PINAAVRLR

SEQ ID NO: 49796 - protein, 9 aa, synthetic construct
PINAALHLR

SEQ ID NO: 49797 - protein, 9 aa, synthetic construct
PINAALRLY

SEQ ID NO: 49798 - protein, 9 aa, synthetic construct
PINAALRLK

SEQ ID NO: 49799 - protein, 9 aa, synthetic construct
PINAALRLF

SEQ ID NO: 49800 - protein, 9 aa, synthetic construct
PINAALKLR

SEQ ID NO: 49801 - protein, 9 aa, synthetic construct
PINAALKVR

SEQ ID NO: 49802 - protein, 9 aa, synthetic construct
PINAALKVK

SEQ ID NO: 49803 - protein, 9 aa, synthetic construct
PINAAARLR

SEQ ID NO: 49804 - protein, 9 aa, synthetic construct
PINAAAKLR

SEQ ID NO: 49805 - protein, 9 aa, synthetic construct
PINAAGKLR

SEQ ID NO: 49806 - protein, 9 aa, synthetic construct
PINAAGKLK

SEQ ID NO: 49807 - protein, 9 aa, synthetic construct
PINATVRVR

SEQ ID NO: 49808 - protein, 9 aa, synthetic construct
PINATLRLY

SEQ ID NO: 49809 - protein, 9 aa, synthetic construct
PINATLRLR

SEQ ID NO: 49810 - protein, 9 aa, synthetic construct
PINATLRLH

SEQ ID NO: 49811 - protein, 9 aa, synthetic construct
PINATLRLK

SEQ ID NO: 49812 - protein, 9 aa, synthetic construct
PINATLRVY

SEQ ID NO: 49813 - protein, 9 aa, synthetic construct
PINATLRVR

SEQ ID NO: 49814 - protein, 9 aa, synthetic construct
PINATLRVK

SEQ ID NO: 49815 - protein, 9 aa, synthetic construct
PINATLKLR

SEQ ID NO: 49816 - protein, 9 aa, synthetic construct
PINATLKLK

SEQ ID NO: 49817 - protein, 9 aa, synthetic construct
PINATLKVR

SEQ ID NO: 49818 - protein, 9 aa, synthetic construct
PINATLKVK

SEQ ID NO: 49819 - protein, 9 aa, synthetic construct
PINATARLR

SEQ ID NO: 49820 - protein, 9 aa, synthetic construct
PINATARVK

SEQ ID NO: 49821 - protein, 9 aa, synthetic construct
PINATIRLK

SEQ ID NO: 49822 - protein, 9 aa, synthetic construct
PINATIRLF

SEQ ID NO: 49823 - protein, 9 aa, synthetic construct
PINATIKLF

SEQ ID NO: 49824 - protein, 9 aa, synthetic construct
PINATIKVK

SEQ ID NO: 49825 - protein, 9 aa, synthetic construct
PINATGRVK

SEQ ID NO: 49826 - protein, 9 aa, synthetic construct
PINATGKLR

SEQ ID NO: 49827 - protein, 9 aa, synthetic construct
PINATGKVR

SEQ ID NO: 49828 - protein, 9 aa, synthetic construct
PINATGKVK

SEQ ID NO: 49829 - protein, 9 aa, synthetic construct
PINASVHVH

SEQ ID NO: 49830 - protein, 9 aa, synthetic construct
PINASVRLR

SEQ ID NO: 49831 - protein, 9 aa, synthetic construct
PINASVRLK

SEQ ID NO: 49832 - protein, 9 aa, synthetic construct
PINASVRVR

SEQ ID NO: 49833 - protein, 9 aa, synthetic construct
PINASLHVF

SEQ ID NO: 49834 - protein, 9 aa, synthetic construct
PINASLRLY

SEQ ID NO: 49835 - protein, 9 aa, synthetic construct
PINASLRLR

SEQ ID NO: 49836 - protein, 9 aa, synthetic construct
PINASLRLH

SEQ ID NO: 49837 - protein, 9 aa, synthetic construct
PINASLRLK

SEQ ID NO: 49838 - protein, 9 aa, synthetic construct
PINASLRVY

SEQ ID NO: 49839 - protein, 9 aa, synthetic construct
PINASLKLK

SEQ ID NO: 49840 - protein, 9 aa, synthetic construct
PINASARVR

SEQ ID NO: 49841 - protein, 9 aa, synthetic construct
PINASARVK

SEQ ID NO: 49842 - protein, 9 aa, synthetic construct
PINASAKLK

SEQ ID NO: 49843 - protein, 9 aa, synthetic construct
PINASIRLY

SEQ ID NO: 49844 - protein, 9 aa, synthetic construct
PINASGRVR

SEQ ID NO: 49845 - protein, 9 aa, synthetic construct
PINASGKVR

SEQ ID NO: 49846 - protein, 9 aa, synthetic construct
PINAVVHLK

SEQ ID NO: 49847 - protein, 9 aa, synthetic construct
PINAVVRLR

SEQ ID NO: 49848 - protein, 9 aa, synthetic construct
PINAVVRVY

SEQ ID NO: 49849 - protein, 9 aa, synthetic construct
PINAVVRVR

SEQ ID NO: 49850 - protein, 9 aa, synthetic construct
PINAVLHLY

SEQ ID NO: 49851 - protein, 9 aa, synthetic construct
PINAVLHLH

SEQ ID NO: 49852 - protein, 9 aa, synthetic construct
PINAVLHLK

SEQ ID NO: 49853 - protein, 9 aa, synthetic construct
PINAVLHLF

SEQ ID NO: 49854 - protein, 9 aa, synthetic construct
PINAVLHVH

SEQ ID NO: 49855 - protein, 9 aa, synthetic construct
PINAVLHVF

SEQ ID NO: 49856 - protein, 9 aa, synthetic construct
PINAVLRLR

SEQ ID NO: 49857 - protein, 9 aa, synthetic construct
PINAVLRLK

SEQ ID NO: 49858 - protein, 9 aa, synthetic construct
PINAVLRVR

SEQ ID NO: 49859 - protein, 9 aa, synthetic construct
PINAVARLY

SEQ ID NO: 49860 - protein, 9 aa, synthetic construct
PINAVARLR

SEQ ID NO: 49861 - protein, 9 aa, synthetic construct
PINAVARLK

SEQ ID NO: 49862 - protein, 9 aa, synthetic construct
PINAVARVK

SEQ ID NO: 49863 - protein, 9 aa, synthetic construct
PINAVIHLH

SEQ ID NO: 49864 - protein, 9 aa, synthetic construct
PINAVIHVY

SEQ ID NO: 49865 - protein, 9 aa, synthetic construct
PINAVIRLK

SEQ ID NO: 49866 - protein, 9 aa, synthetic construct
PINAVGRLR

SEQ ID NO: 49867 - protein, 9 aa, synthetic construct
PINAVGKLK

SEQ ID NO: 49868 - protein, 9 aa, synthetic construct
PINAVGKVK

SEQ ID NO: 49869 - protein, 9 aa, synthetic construct
PINAGVHVH

SEQ ID NO: 49870 - protein, 9 aa, synthetic construct
PINAGLHLR

SEQ ID NO: 49871 - protein, 9 aa, synthetic construct
PINAGLHVR

SEQ ID NO: 49872 - protein, 9 aa, synthetic construct
PINAGLHVF

SEQ ID NO: 49873 - protein, 9 aa, synthetic construct
PINAGLRLY

SEQ ID NO: 49874 - protein, 9 aa, synthetic construct
PINAGLRLR

SEQ ID NO: 49875 - protein, 9 aa, synthetic construct
PINAGLRLH

SEQ ID NO: 49876 - protein, 9 aa, synthetic construct
PINAGLRLK

SEQ ID NO: 49877 - protein, 9 aa, synthetic construct
PINAGLRVY

SEQ ID NO: 49878 - protein, 9 aa, synthetic construct
PINAGLRVR

SEQ ID NO: 49879 - protein, 9 aa, synthetic construct
PINAGLRVH

SEQ ID NO: 49880 - protein, 9 aa, synthetic construct
PINAGLRVK

SEQ ID NO: 49881 - protein, 9 aa, synthetic construct
PINAGLKLR

SEQ ID NO: 49882 - protein, 9 aa, synthetic construct
PINAGLKLH

SEQ ID NO: 49883 - protein, 9 aa, synthetic construct
PINAGLKLK

SEQ ID NO: 49884 - protein, 9 aa, synthetic construct
PINAGLKVR

SEQ ID NO: 49885 - protein, 9 aa, synthetic construct
PINAGARLR

SEQ ID NO: 49886 - protein, 9 aa, synthetic construct
PINAGARLK

SEQ ID NO: 49887 - protein, 9 aa, synthetic construct
PINAGAKVK

SEQ ID NO: 49888 - protein, 9 aa, synthetic construct
PINAGIRLR

SEQ ID NO: 49889 - protein, 9 aa, synthetic construct
PINAGIRVK

SEQ ID NO: 49890 - protein, 9 aa, synthetic construct
PINAGGRVK

SEQ ID NO: 49891 - protein, 9 aa, synthetic construct
PIQGAVRLR

SEQ ID NO: 49892 - protein, 9 aa, synthetic construct
PIQGAVRVK

SEQ ID NO: 49893 - protein, 9 aa, synthetic construct
PIQGAVKLK

SEQ ID NO: 49894 - protein, 9 aa, synthetic construct
PIQGALRLR

SEQ ID NO: 49895 - protein, 9 aa, synthetic construct
PIQGALRLK

SEQ ID NO: 49896 - protein, 9 aa, synthetic construct
PIQGALRVY

SEQ ID NO: 49897 - protein, 9 aa, synthetic construct
PIQGALRVR

SEQ ID NO: 49898 - protein, 9 aa, synthetic construct
PIQGALKLK

SEQ ID NO: 49899 - protein, 9 aa, synthetic construct
PIQGALKVK

SEQ ID NO: 49900 - protein, 9 aa, synthetic construct
PIQGAARLR

SEQ ID NO: 49901 - protein, 9 aa, synthetic construct
PIQGAARVK

SEQ ID NO: 49902 - protein, 9 aa, synthetic construct
PIQGAIRLR

SEQ ID NO: 49903 - protein, 9 aa, synthetic construct
PIQGAIRLK

SEQ ID NO: 49904 - protein, 9 aa, synthetic construct
PIQGAGRLR

SEQ ID NO: 49905 - protein, 9 aa, synthetic construct
PIQGAGKVR

SEQ ID NO: 49906 - protein, 9 aa, synthetic construct
PIQGTVRLR

SEQ ID NO: 49907 - protein, 9 aa, synthetic construct
PIQGTVRLK

SEQ ID NO: 49908 - protein, 9 aa, synthetic construct
PIQGTVRVR

SEQ ID NO: 49909 - protein, 9 aa, synthetic construct
PIQGTVRVK

SEQ ID NO: 49910 - protein, 9 aa, synthetic construct
PIQGTVKLK

SEQ ID NO: 49911 - protein, 9 aa, synthetic construct
PIQGTLRLR

SEQ ID NO: 49912 - protein, 9 aa, synthetic construct
PIQGTLRVY

SEQ ID NO: 49913 - protein, 9 aa, synthetic construct
PIQGTLRVR

SEQ ID NO: 49914 - protein, 9 aa, synthetic construct
PIQGTLRVK

SEQ ID NO: 49915 - protein, 9 aa, synthetic construct
PIQGTLKLK

SEQ ID NO: 49916 - protein, 9 aa, synthetic construct
PIQGTLKVK

SEQ ID NO: 49917 - protein, 9 aa, synthetic construct
PIQGTARLR

SEQ ID NO: 49918 - protein, 9 aa, synthetic construct
PIQGTARLK

SEQ ID NO: 49919 - protein, 9 aa, synthetic construct
PIQGTIRVR

SEQ ID NO: 49920 - protein, 9 aa, synthetic construct
PIQGTIKLK

SEQ ID NO: 49921 - protein, 9 aa, synthetic construct
PIQGTGRLR

SEQ ID NO: 49922 - protein, 9 aa, synthetic construct
PIQGTGKLR

SEQ ID NO: 49923 - protein, 9 aa, synthetic construct
PIQGTGKVK

SEQ ID NO: 49924 - protein, 9 aa, synthetic construct
PIQGSVRLK

SEQ ID NO: 49925 - protein, 9 aa, synthetic construct
PIQGSVRVR

SEQ ID NO: 49926 - protein, 9 aa, synthetic construct
PIQGSVRVK

SEQ ID NO: 49927 - protein, 9 aa, synthetic construct
PIQGSVKLK

SEQ ID NO: 49928 - protein, 9 aa, synthetic construct
PIQGSLRLY

SEQ ID NO: 49929 - protein, 9 aa, synthetic construct
PIQGSLRLR

SEQ ID NO: 49930 - protein, 9 aa, synthetic construct
PIQGSLRLH

SEQ ID NO: 49931 - protein, 9 aa, synthetic construct
PIQGSLRLK

SEQ ID NO: 49932 - protein, 9 aa, synthetic construct
PIQGSLRLF

SEQ ID NO: 49933 - protein, 9 aa, synthetic construct
PIQGSLRVY

SEQ ID NO: 49934 - protein, 9 aa, synthetic construct
PIQGSLRVR

SEQ ID NO: 49935 - protein, 9 aa, synthetic construct
PIQGSLRVH

SEQ ID NO: 49936 - protein, 9 aa, synthetic construct
PIQGSLKLR

SEQ ID NO: 49937 - protein, 9 aa, synthetic construct
PIQGSLKLK

SEQ ID NO: 49938 - protein, 9 aa, synthetic construct
PIQGSLKVR

SEQ ID NO: 49939 - protein, 9 aa, synthetic construct
PIQGSLKVK

SEQ ID NO: 49940 - protein, 9 aa, synthetic construct
PIQGSARLR

SEQ ID NO: 49941 - protein, 9 aa, synthetic construct
PIQGSARVR

SEQ ID NO: 49942 - protein, 9 aa, synthetic construct
PIQGSARVK

SEQ ID NO: 49943 - protein, 9 aa, synthetic construct
PIQGSAKLR

SEQ ID NO: 49944 - protein, 9 aa, synthetic construct
PIQGSAKLH

SEQ ID NO: 49945 - protein, 9 aa, synthetic construct
PIQGSAKLK

SEQ ID NO: 49946 - protein, 9 aa, synthetic construct
PIQGSAKVR

SEQ ID NO: 49947 - protein, 9 aa, synthetic construct
PIQGSAKVK

SEQ ID NO: 49948 - protein, 9 aa, synthetic construct
PIQGSIRLR

SEQ ID NO: 49949 - protein, 9 aa, synthetic construct
PIQGSIRLK

SEQ ID NO: 49950 - protein, 9 aa, synthetic construct
PIQGSGHVR

SEQ ID NO: 49951 - protein, 9 aa, synthetic construct
PIQGVVRLR

SEQ ID NO: 49952 - protein, 9 aa, synthetic construct
PIQGVVRLK

SEQ ID NO: 49953 - protein, 9 aa, synthetic construct
PIQGVVRVK

SEQ ID NO: 49954 - protein, 9 aa, synthetic construct
PIQGVVKLR

SEQ ID NO: 49955 - protein, 9 aa, synthetic construct
PIQGVLHLR

SEQ ID NO: 49956 - protein, 9 aa, synthetic construct
PIQGVLRLY

SEQ ID NO: 49957 - protein, 9 aa, synthetic construct
PIQGVLRLR

SEQ ID NO: 49958 - protein, 9 aa, synthetic construct
PIQGVLKLK

SEQ ID NO: 49959 - protein, 9 aa, synthetic construct
PIQGVLKVK

SEQ ID NO: 49960 - protein, 9 aa, synthetic construct
PIQGVARLY

SEQ ID NO: 49961 - protein, 9 aa, synthetic construct
PIQGVARLR

SEQ ID NO: 49962 - protein, 9 aa, synthetic construct
PIQGVARLK

SEQ ID NO: 49963 - protein, 9 aa, synthetic construct
PIQGVAKLK

SEQ ID NO: 49964 - protein, 9 aa, synthetic construct
PIQGVIRLR

SEQ ID NO: 49965 - protein, 9 aa, synthetic construct
PIQGVIRLK

SEQ ID NO: 49966 - protein, 9 aa, synthetic construct
PIQGVIRVY

SEQ ID NO: 49967 - protein, 9 aa, synthetic construct
PIQGVIRVR

SEQ ID NO: 49968 - protein, 9 aa, synthetic construct
PIQGVGRLK

SEQ ID NO: 49969 - protein, 9 aa, synthetic construct
PIQGVGRVR

SEQ ID NO: 49970 - protein, 9 aa, synthetic construct
PIQGGVHVH

SEQ ID NO: 49971 - protein, 9 aa, synthetic construct
PIQGGLRLR

SEQ ID NO: 49972 - protein, 9 aa, synthetic construct
PIQGGLRLK

SEQ ID NO: 49973 - protein, 9 aa, synthetic construct
PIQGGLRLF

SEQ ID NO: 49974 - protein, 9 aa, synthetic construct
PIQGGLKLK

SEQ ID NO: 49975 - protein, 9 aa, synthetic construct
PIQGGLKVR

SEQ ID NO: 49976 - protein, 9 aa, synthetic construct
PIQGGARLR

SEQ ID NO: 49977 - protein, 9 aa, synthetic construct
PIQGGARLK

SEQ ID NO: 49978 - protein, 9 aa, synthetic construct
PIQGGAKLK

SEQ ID NO: 49979 - protein, 9 aa, synthetic construct
PIQGGAKVK

SEQ ID NO: 49980 - protein, 9 aa, synthetic construct
PIQGGIKLR

SEQ ID NO: 49981 - protein, 9 aa, synthetic construct
PIQGGGKLR

SEQ ID NO: 49982 - protein, 9 aa, synthetic construct
PIQAALRLR

SEQ ID NO: 49983 - protein, 9 aa, synthetic construct
PIQAALRVR

SEQ ID NO: 49984 - protein, 9 aa, synthetic construct
PIQAALRVK

SEQ ID NO: 49985 - protein, 9 aa, synthetic construct
PIQAALKLK

SEQ ID NO: 49986 - protein, 9 aa, synthetic construct
PIQAALKVR

SEQ ID NO: 49987 - protein, 9 aa, synthetic construct
PIQAAARVK

SEQ ID NO: 49988 - protein, 9 aa, synthetic construct
PIQAAAKLK

SEQ ID NO: 49989 - protein, 9 aa, synthetic construct
PIQAAIRLK

SEQ ID NO: 49990 - protein, 9 aa, synthetic construct
PIQATVHLF

SEQ ID NO: 49991 - protein, 9 aa, synthetic construct
PIQATVRVR

SEQ ID NO: 49992 - protein, 9 aa, synthetic construct
PIQATVRVK

SEQ ID NO: 49993 - protein, 9 aa, synthetic construct
PIQATVKLK

SEQ ID NO: 49994 - protein, 9 aa, synthetic construct
PIQATLHVF

SEQ ID NO: 49995 - protein, 9 aa, synthetic construct
PIQATLRLR

SEQ ID NO: 49996 - protein, 9 aa, synthetic construct
PIQATLRLK

SEQ ID NO: 49997 - protein, 9 aa, synthetic construct
PIQATLRVY

SEQ ID NO: 49998 - protein, 9 aa, synthetic construct
PIQATLRVK

SEQ ID NO: 49999 - protein, 9 aa, synthetic construct
PIQATLKVK

SEQ ID NO: 50000 - protein, 9 aa, synthetic construct
PIQATARLR

SEQ ID NO: 50001 - protein, 9 aa, synthetic construct
PIQATARLK

SEQ ID NO: 50002 - protein, 9 aa, synthetic construct
PIQATARVK

SEQ ID NO: 50003 - protein, 9 aa, synthetic construct
PIQATIRLR

SEQ ID NO: 50004 - protein, 9 aa, synthetic construct
PIQATIRLK

SEQ ID NO: 50005 - protein, 9 aa, synthetic construct
PIQATGRLR

SEQ ID NO: 50006 - protein, 9 aa, synthetic construct
PIQASVHLH

SEQ ID NO: 50007 - protein, 9 aa, synthetic construct
PIQASVHVH

SEQ ID NO: 50008 - protein, 9 aa, synthetic construct
PIQASVRVR

SEQ ID NO: 50009 - protein, 9 aa, synthetic construct
PIQASVRVK

SEQ ID NO: 50010 - protein, 9 aa, synthetic construct
PIQASVKLK

SEQ ID NO: 50011 - protein, 9 aa, synthetic construct
PIQASVKVR

SEQ ID NO: 50012 - protein, 9 aa, synthetic construct
PIQASVKVK

SEQ ID NO: 50013 - protein, 9 aa, synthetic construct
PIQASLHVY

SEQ ID NO: 50014 - protein, 9 aa, synthetic construct
PIQASLRLY

SEQ ID NO: 50015 - protein, 9 aa, synthetic construct
PIQASLRLR

SEQ ID NO: 50016 - protein, 9 aa, synthetic construct
PIQASLRLF

SEQ ID NO: 50017 - protein, 9 aa, synthetic construct
PIQASLRVY

SEQ ID NO: 50018 - protein, 9 aa, synthetic construct
PIQASLRVR

SEQ ID NO: 50019 - protein, 9 aa, synthetic construct
PIQASLRVH

SEQ ID NO: 50020 - protein, 9 aa, synthetic construct
PIQASLRVK

SEQ ID NO: 50021 - protein, 9 aa, synthetic construct
PIQASLRVF

SEQ ID NO: 50022 - protein, 9 aa, synthetic construct
PIQASLKLR

SEQ ID NO: 50023 - protein, 9 aa, synthetic construct
PIQASLKLK

SEQ ID NO: 50024 - protein, 9 aa, synthetic construct
PIQASLKVR

SEQ ID NO: 50025 - protein, 9 aa, synthetic construct
PIQASLKVK

SEQ ID NO: 50026 - protein, 9 aa, synthetic construct
PIQASLKVF

SEQ ID NO: 50027 - protein, 9 aa, synthetic construct
PIQASARLY

SEQ ID NO: 50028 - protein, 9 aa, synthetic construct
PIQASARLR

SEQ ID NO: 50029 - protein, 9 aa, synthetic construct
PIQASARVR

SEQ ID NO: 50030 - protein, 9 aa, synthetic construct
PIQASARVH

SEQ ID NO: 50031 - protein, 9 aa, synthetic construct
PIQASAKLR

SEQ ID NO: 50032 - protein, 9 aa, synthetic construct
PIQASAKLK

SEQ ID NO: 50033 - protein, 9 aa, synthetic construct
PIQASAKVR

SEQ ID NO: 50034 - protein, 9 aa, synthetic construct
PIQASAKVK

SEQ ID NO: 50035 - protein, 9 aa, synthetic construct
PIQASIRLK

SEQ ID NO: 50036 - protein, 9 aa, synthetic construct
PIQASIRLF

SEQ ID NO: 50037 - protein, 9 aa, synthetic construct
PIQASIRVK

SEQ ID NO: 50038 - protein, 9 aa, synthetic construct
PIQASIKVK

SEQ ID NO: 50039 - protein, 9 aa, synthetic construct
PIQASGRLR

SEQ ID NO: 50040 - protein, 9 aa, synthetic construct
PIQAVVHLR

SEQ ID NO: 50041 - protein, 9 aa, synthetic construct
PIQAVVHLK

SEQ ID NO: 50042 - protein, 9 aa, synthetic construct
PIQAVVHLF

SEQ ID NO: 50043 - protein, 9 aa, synthetic construct
PIQAVVRVY

SEQ ID NO: 50044 - protein, 9 aa, synthetic construct
PIQAVVRVK

SEQ ID NO: 50045 - protein, 9 aa, synthetic construct
PIQAVVKVR

SEQ ID NO: 50046 - protein, 9 aa, synthetic construct
PIQAVLHLY

SEQ ID NO: 50047 - protein, 9 aa, synthetic construct
PIQAVLHLR

SEQ ID NO: 50048 - protein, 9 aa, synthetic construct
PIQAVLHLK

SEQ ID NO: 50049 - protein, 9 aa, synthetic construct
PIQAVLHLF

SEQ ID NO: 50050 - protein, 9 aa, synthetic construct
PIQAVLHVR

SEQ ID NO: 50051 - protein, 9 aa, synthetic construct
PIQAVLHVK

SEQ ID NO: 50052 - protein, 9 aa, synthetic construct
PIQAVLRLK

SEQ ID NO: 50053 - protein, 9 aa, synthetic construct
PIQAVLRVY

SEQ ID NO: 50054 - protein, 9 aa, synthetic construct
PIQAVLRVK

SEQ ID NO: 50055 - protein, 9 aa, synthetic construct
PIQAVLKVH

SEQ ID NO: 50056 - protein, 9 aa, synthetic construct
PIQAVLKVK

SEQ ID NO: 50057 - protein, 9 aa, synthetic construct
PIQAVARLY

SEQ ID NO: 50058 - protein, 9 aa, synthetic construct
PIQAVARLR

SEQ ID NO: 50059 - protein, 9 aa, synthetic construct
PIQAVARLH

SEQ ID NO: 50060 - protein, 9 aa, synthetic construct
PIQAVARLK

SEQ ID NO: 50061 - protein, 9 aa, synthetic construct
PIQAVARVY

SEQ ID NO: 50062 - protein, 9 aa, synthetic construct
PIQAVARVR

SEQ ID NO: 50063 - protein, 9 aa, synthetic construct
PIQAVARVK

SEQ ID NO: 50064 - protein, 9 aa, synthetic construct
PIQAVAKLR

SEQ ID NO: 50065 - protein, 9 aa, synthetic construct
PIQAVAKLK

SEQ ID NO: 50066 - protein, 9 aa, synthetic construct
PIQAVAKVK

SEQ ID NO: 50067 - protein, 9 aa, synthetic construct
PIQAVGKLR

SEQ ID NO: 50068 - protein, 9 aa, synthetic construct
PIQAVGKVR

SEQ ID NO: 50069 - protein, 9 aa, synthetic construct
PIQAGVHVH

SEQ ID NO: 50070 - protein, 9 aa, synthetic construct
PIQAGLHLY

SEQ ID NO: 50071 - protein, 9 aa, synthetic construct
PIQAGLHLR

SEQ ID NO: 50072 - protein, 9 aa, synthetic construct
PIQAGLHLH

SEQ ID NO: 50073 - protein, 9 aa, synthetic construct
PIQAGLHLK

SEQ ID NO: 50074 - protein, 9 aa, synthetic construct
PIQAGLHLF

SEQ ID NO: 50075 - protein, 9 aa, synthetic construct
PIQAGLHVY

SEQ ID NO: 50076 - protein, 9 aa, synthetic construct
PIQAGLHVR

SEQ ID NO: 50077 - protein, 9 aa, synthetic construct
PIQAGLHVF

SEQ ID NO: 50078 - protein, 9 aa, synthetic construct
PIQAGLRLR

SEQ ID NO: 50079 - protein, 9 aa, synthetic construct
PIQAGLRLK

SEQ ID NO: 50080 - protein, 9 aa, synthetic construct
PIQAGLRLF

SEQ ID NO: 50081 - protein, 9 aa, synthetic construct
PIQAGLRVR

SEQ ID NO: 50082 - protein, 9 aa, synthetic construct
PIQAGLRVH

SEQ ID NO: 50083 - protein, 9 aa, synthetic construct
PIQAGLRVK

SEQ ID NO: 50084 - protein, 9 aa, synthetic construct
PIQAGLRVF

SEQ ID NO: 50085 - protein, 9 aa, synthetic construct
PIQAGLKLR

SEQ ID NO: 50086 - protein, 9 aa, synthetic construct
PIQAGLKLK

SEQ ID NO: 50087 - protein, 9 aa, synthetic construct
PIQAGARLR

SEQ ID NO: 50088 - protein, 9 aa, synthetic construct
PIQAGAKLR

SEQ ID NO: 50089 - protein, 9 aa, synthetic construct
PIQAGAKLK

SEQ ID NO: 50090 - protein, 9 aa, synthetic construct
PIQAGIRLR

SEQ ID NO: 50091 - protein, 9 aa, synthetic construct
PIQAGIRVK

SEQ ID NO: 50092 - protein, 9 aa, synthetic construct
PIQAGIKLK

SEQ ID NO: 50093 - protein, 9 aa, synthetic construct
PIPGAVRLR

SEQ ID NO: 50094 - protein, 9 aa, synthetic construct
PIPGALRLR

SEQ ID NO: 50095 - protein, 9 aa, synthetic construct
PIPGALRLK

SEQ ID NO: 50096 - protein, 9 aa, synthetic construct
PIPGALRVY

SEQ ID NO: 50097 - protein, 9 aa, synthetic construct
PIPGALRVR

SEQ ID NO: 50098 - protein, 9 aa, synthetic construct
PIPGALKLY

SEQ ID NO: 50099 - protein, 9 aa, synthetic construct
PIPGALKLK

SEQ ID NO: 50100 - protein, 9 aa, synthetic construct
PIPGALKVK

SEQ ID NO: 50101 - protein, 9 aa, synthetic construct
PIPGAIRVK

SEQ ID NO: 50102 - protein, 9 aa, synthetic construct
PIPGAIKLR

SEQ ID NO: 50103 - protein, 9 aa, synthetic construct
PIPGAIKLK

SEQ ID NO: 50104 - protein, 9 aa, synthetic construct
PIPGAGKLK

SEQ ID NO: 50105 - protein, 9 aa, synthetic construct
PIPGTVRVR

SEQ ID NO: 50106 - protein, 9 aa, synthetic construct
PIPGTVRVK

SEQ ID NO: 50107 - protein, 9 aa, synthetic construct
PIPGTVKLR

SEQ ID NO: 50108 - protein, 9 aa, synthetic construct
PIPGTLRVH

SEQ ID NO: 50109 - protein, 9 aa, synthetic construct
PIPGTLRVF

SEQ ID NO: 50110 - protein, 9 aa, synthetic construct
PIPGTLKVK

SEQ ID NO: 50111 - protein, 9 aa, synthetic construct
PIPGTARVR

SEQ ID NO: 50112 - protein, 9 aa, synthetic construct
PIPGTIRLK

SEQ ID NO: 50113 - protein, 9 aa, synthetic construct
PIPGSVHVH

SEQ ID NO: 50114 - protein, 9 aa, synthetic construct
PIPGSVRLR

SEQ ID NO: 50115 - protein, 9 aa, synthetic construct
PIPGSVRVK

SEQ ID NO: 50116 - protein, 9 aa, synthetic construct
PIPGSLRLY

SEQ ID NO: 50117 - protein, 9 aa, synthetic construct
PIPGSLRLR

SEQ ID NO: 50118 - protein, 9 aa, synthetic construct
PIPGSLRLH

SEQ ID NO: 50119 - protein, 9 aa, synthetic construct
PIPGSLRLK

SEQ ID NO: 50120 - protein, 9 aa, synthetic construct
PIPGSLRLF

SEQ ID NO: 50121 - protein, 9 aa, synthetic construct
PIPGSLRVR

SEQ ID NO: 50122 - protein, 9 aa, synthetic construct
PIPGSLRVK

SEQ ID NO: 50123 - protein, 9 aa, synthetic construct
PIPGSLKLR

SEQ ID NO: 50124 - protein, 9 aa, synthetic construct
PIPGSLKLK

SEQ ID NO: 50125 - protein, 9 aa, synthetic construct
PIPGSLKLF

SEQ ID NO: 50126 - protein, 9 aa, synthetic construct
PIPGSLKVK

SEQ ID NO: 50127 - protein, 9 aa, synthetic construct
PIPGSARLK

SEQ ID NO: 50128 - protein, 9 aa, synthetic construct
PIPGSARVR

SEQ ID NO: 50129 - protein, 9 aa, synthetic construct
PIPGSARVK

SEQ ID NO: 50130 - protein, 9 aa, synthetic construct
PIPGSAKLR

SEQ ID NO: 50131 - protein, 9 aa, synthetic construct
PIPGSAKLK

SEQ ID NO: 50132 - protein, 9 aa, synthetic construct
PIPGSAKVK

SEQ ID NO: 50133 - protein, 9 aa, synthetic construct
PIPGSIRLK

SEQ ID NO: 50134 - protein, 9 aa, synthetic construct
PIPGSIRVK

SEQ ID NO: 50135 - protein, 9 aa, synthetic construct
PIPGSIKLR

SEQ ID NO: 50136 - protein, 9 aa, synthetic construct
PIPGSIKLK

SEQ ID NO: 50137 - protein, 9 aa, synthetic construct
PIPGSGRLR

SEQ ID NO: 50138 - protein, 9 aa, synthetic construct
PIPGSGRLK

SEQ ID NO: 50139 - protein, 9 aa, synthetic construct
PIPGSGRVR

SEQ ID NO: 50140 - protein, 9 aa, synthetic construct
PIPGSGKLR

SEQ ID NO: 50141 - protein, 9 aa, synthetic construct
PIPGSGKLK

SEQ ID NO: 50142 - protein, 9 aa, synthetic construct
PIPGSGKVR

SEQ ID NO: 50143 - protein, 9 aa, synthetic construct
PIPGVVRLR

SEQ ID NO: 50144 - protein, 9 aa, synthetic construct
PIPGVVRLH

SEQ ID NO: 50145 - protein, 9 aa, synthetic construct
PIPGVVRVR

SEQ ID NO: 50146 - protein, 9 aa, synthetic construct
PIPGVVRVK

SEQ ID NO: 50147 - protein, 9 aa, synthetic construct
PIPGVVKVR

SEQ ID NO: 50148 - protein, 9 aa, synthetic construct
PIPGVLHLY

SEQ ID NO: 50149 - protein, 9 aa, synthetic construct
PIPGVLHLF

SEQ ID NO: 50150 - protein, 9 aa, synthetic construct
PIPGVLHVF

SEQ ID NO: 50151 - protein, 9 aa, synthetic construct
PIPGVLRLR

SEQ ID NO: 50152 - protein, 9 aa, synthetic construct
PIPGVLRVY

SEQ ID NO: 50153 - protein, 9 aa, synthetic construct
PIPGVLKVK

SEQ ID NO: 50154 - protein, 9 aa, synthetic construct
PIPGVARLH

SEQ ID NO: 50155 - protein, 9 aa, synthetic construct
PIPGVARVK

SEQ ID NO: 50156 - protein, 9 aa, synthetic construct
PIPGVAKLK

SEQ ID NO: 50157 - protein, 9 aa, synthetic construct
PIPGVGRLK

SEQ ID NO: 50158 - protein, 9 aa, synthetic construct
PIPGVGRVR

SEQ ID NO: 50159 - protein, 9 aa, synthetic construct
PIPGVGKVK

SEQ ID NO: 50160 - protein, 9 aa, synthetic construct
PIPGGVRLK

SEQ ID NO: 50161 - protein, 9 aa, synthetic construct
PIPGGLRLR

SEQ ID NO: 50162 - protein, 9 aa, synthetic construct
PIPGGLRLK

SEQ ID NO: 50163 - protein, 9 aa, synthetic construct
PIPGGLRVR

SEQ ID NO: 50164 - protein, 9 aa, synthetic construct
PIPGGLRVK

SEQ ID NO: 50165 - protein, 9 aa, synthetic construct
PIPGGLKLR

SEQ ID NO: 50166 - protein, 9 aa, synthetic construct
PIPGGLKLK

SEQ ID NO: 50167 - protein, 9 aa, synthetic construct
PIPGGLKVK

SEQ ID NO: 50168 - protein, 9 aa, synthetic construct
PIPGGARLR

SEQ ID NO: 50169 - protein, 9 aa, synthetic construct
PIPGGARLK

SEQ ID NO: 50170 - protein, 9 aa, synthetic construct
PIPGGAKLK

SEQ ID NO: 50171 - protein, 9 aa, synthetic construct
PIPGGIRLR

SEQ ID NO: 50172 - protein, 9 aa, synthetic construct
PIPGGIKVK

SEQ ID NO: 50173 - protein, 9 aa, synthetic construct
PIPGGGRLR

SEQ ID NO: 50174 - protein, 9 aa, synthetic construct
PIPAAVRLR

SEQ ID NO: 50175 - protein, 9 aa, synthetic construct
PIPAAVRLK

SEQ ID NO: 50176 - protein, 9 aa, synthetic construct
PIPAAVRVR

SEQ ID NO: 50177 - protein, 9 aa, synthetic construct
PIPAAVRVK

SEQ ID NO: 50178 - protein, 9 aa, synthetic construct
PIPAALRLR

SEQ ID NO: 50179 - protein, 9 aa, synthetic construct
PIPAALRLK

SEQ ID NO: 50180 - protein, 9 aa, synthetic construct
PIPAALRVY

SEQ ID NO: 50181 - protein, 9 aa, synthetic construct
PIPAALRVR

SEQ ID NO: 50182 - protein, 9 aa, synthetic construct
PIPAALRVK

SEQ ID NO: 50183 - protein, 9 aa, synthetic construct
PIPAALKLR

SEQ ID NO: 50184 - protein, 9 aa, synthetic construct
PIPAALKVR

SEQ ID NO: 50185 - protein, 9 aa, synthetic construct
PIPAALKVK

SEQ ID NO: 50186 - protein, 9 aa, synthetic construct
PIPAAARVK

SEQ ID NO: 50187 - protein, 9 aa, synthetic construct
PIPAAGRLR

SEQ ID NO: 50188 - protein, 9 aa, synthetic construct
PIPATVRLR

SEQ ID NO: 50189 - protein, 9 aa, synthetic construct
PIPATVRVR

SEQ ID NO: 50190 - protein, 9 aa, synthetic construct
PIPATIKLK

SEQ ID NO: 50191 - protein, 9 aa, synthetic construct
PIPATGRLR

SEQ ID NO: 50192 - protein, 9 aa, synthetic construct
PIPATGKLR

SEQ ID NO: 50193 - protein, 9 aa, synthetic construct
PIPASVHVH

SEQ ID NO: 50194 - protein, 9 aa, synthetic construct
PIPASVRLK

SEQ ID NO: 50195 - protein, 9 aa, synthetic construct
PIPASVRVK

SEQ ID NO: 50196 - protein, 9 aa, synthetic construct
PIPASLRLY

SEQ ID NO: 50197 - protein, 9 aa, synthetic construct
PIPASLKLR

SEQ ID NO: 50198 - protein, 9 aa, synthetic construct
PIPASARLK

SEQ ID NO: 50199 - protein, 9 aa, synthetic construct
PIPASARVR

SEQ ID NO: 50200 - protein, 9 aa, synthetic construct
PIPASAKLK

SEQ ID NO: 50201 - protein, 9 aa, synthetic construct
PIPASAKVK

SEQ ID NO: 50202 - protein, 9 aa, synthetic construct
PIPASIRLR

SEQ ID NO: 50203 - protein, 9 aa, synthetic construct
PIPASIRVY

SEQ ID NO: 50204 - protein, 9 aa, synthetic construct
PIPASIRVR

SEQ ID NO: 50205 - protein, 9 aa, synthetic construct
PIPASIRVK

SEQ ID NO: 50206 - protein, 9 aa, synthetic construct
PIPASIKLR

SEQ ID NO: 50207 - protein, 9 aa, synthetic construct
PIPASIKVK

SEQ ID NO: 50208 - protein, 9 aa, synthetic construct
PIPASGRLR

SEQ ID NO: 50209 - protein, 9 aa, synthetic construct
PIPASGRLK

SEQ ID NO: 50210 - protein, 9 aa, synthetic construct
PIPASGKLK

SEQ ID NO: 50211 - protein, 9 aa, synthetic construct
PIPASGKVR

SEQ ID NO: 50212 - protein, 9 aa, synthetic construct
PIPAVVHLR

SEQ ID NO: 50213 - protein, 9 aa, synthetic construct
PIPAVVRLR

SEQ ID NO: 50214 - protein, 9 aa, synthetic construct
PIPAVVRLH

SEQ ID NO: 50215 - protein, 9 aa, synthetic construct
PIPAVVRLK

SEQ ID NO: 50216 - protein, 9 aa, synthetic construct
PIPAVVRVY

SEQ ID NO: 50217 - protein, 9 aa, synthetic construct
PIPAVVKLK

SEQ ID NO: 50218 - protein, 9 aa, synthetic construct
PIPAVLHLY

SEQ ID NO: 50219 - protein, 9 aa, synthetic construct
PIPAVLHLR

SEQ ID NO: 50220 - protein, 9 aa, synthetic construct
PIPAVLHLH

SEQ ID NO: 50221 - protein, 9 aa, synthetic construct
PIPAVLHLK

SEQ ID NO: 50222 - protein, 9 aa, synthetic construct
PIPAVLHLF

SEQ ID NO: 50223 - protein, 9 aa, synthetic construct
PIPAVLHVY

SEQ ID NO: 50224 - protein, 9 aa, synthetic construct
PIPAVLHVR

SEQ ID NO: 50225 - protein, 9 aa, synthetic construct
PIPAVLHVF

SEQ ID NO: 50226 - protein, 9 aa, synthetic construct
PIPAVLRLY

SEQ ID NO: 50227 - protein, 9 aa, synthetic construct
PIPAVLRLR

SEQ ID NO: 50228 - protein, 9 aa, synthetic construct
PIPAVLRLK

SEQ ID NO: 50229 - protein, 9 aa, synthetic construct
PIPAVLRLF

SEQ ID NO: 50230 - protein, 9 aa, synthetic construct
PIPAVLRVY

SEQ ID NO: 50231 - protein, 9 aa, synthetic construct
PIPAVLRVH

SEQ ID NO: 50232 - protein, 9 aa, synthetic construct
PIPAVLRVK

SEQ ID NO: 50233 - protein, 9 aa, synthetic construct
PIPAVLKLK

SEQ ID NO: 50234 - protein, 9 aa, synthetic construct
PIPAVARLY

SEQ ID NO: 50235 - protein, 9 aa, synthetic construct
PIPAVARLR

SEQ ID NO: 50236 - protein, 9 aa, synthetic construct
PIPAVARLK

SEQ ID NO: 50237 - protein, 9 aa, synthetic construct
PIPAVARVR

SEQ ID NO: 50238 - protein, 9 aa, synthetic construct
PIPAVARVK

SEQ ID NO: 50239 - protein, 9 aa, synthetic construct
PIPAVARVF

SEQ ID NO: 50240 - protein, 9 aa, synthetic construct
PIPAVAKLR

SEQ ID NO: 50241 - protein, 9 aa, synthetic construct
PIPAVAKLK

SEQ ID NO: 50242 - protein, 9 aa, synthetic construct
PIPAVAKVK

SEQ ID NO: 50243 - protein, 9 aa, synthetic construct
PIPAVIHLY

SEQ ID NO: 50244 - protein, 9 aa, synthetic construct
PIPAVIHLR

SEQ ID NO: 50245 - protein, 9 aa, synthetic construct
PIPAVIHVR

SEQ ID NO: 50246 - protein, 9 aa, synthetic construct
PIPAVIRLF

SEQ ID NO: 50247 - protein, 9 aa, synthetic construct
PIPAVIRVY

SEQ ID NO: 50248 - protein, 9 aa, synthetic construct
PIPAVIKLR

SEQ ID NO: 50249 - protein, 9 aa, synthetic construct
PIPAVIKVK

SEQ ID NO: 50250 - protein, 9 aa, synthetic construct
PIPAVIKVF

SEQ ID NO: 50251 - protein, 9 aa, synthetic construct
PIPAVGRLR

SEQ ID NO: 50252 - protein, 9 aa, synthetic construct
PIPAVGRLK

SEQ ID NO: 50253 - protein, 9 aa, synthetic construct
PIPAVGRVR

SEQ ID NO: 50254 - protein, 9 aa, synthetic construct
PIPAGVHLR

SEQ ID NO: 50255 - protein, 9 aa, synthetic construct
PIPAGVHVH

SEQ ID NO: 50256 - protein, 9 aa, synthetic construct
PIPAGVRLY

SEQ ID NO: 50257 - protein, 9 aa, synthetic construct
PIPAGVRLR

SEQ ID NO: 50258 - protein, 9 aa, synthetic construct
PIPAGVRLK

SEQ ID NO: 50259 - protein, 9 aa, synthetic construct
PIPAGVKLK

SEQ ID NO: 50260 - protein, 9 aa, synthetic construct
PIPAGLHLY

SEQ ID NO: 50261 - protein, 9 aa, synthetic construct
PIPAGLHLR

SEQ ID NO: 50262 - protein, 9 aa, synthetic construct
PIPAGLHLH

SEQ ID NO: 50263 - protein, 9 aa, synthetic construct
PIPAGLHLK

SEQ ID NO: 50264 - protein, 9 aa, synthetic construct
PIPAGLHLF

SEQ ID NO: 50265 - protein, 9 aa, synthetic construct
PIPAGLHVY

SEQ ID NO: 50266 - protein, 9 aa, synthetic construct
PIPAGLHVH

SEQ ID NO: 50267 - protein, 9 aa, synthetic construct
PIPAGLHVF

SEQ ID NO: 50268 - protein, 9 aa, synthetic construct
PIPAGLRLY

SEQ ID NO: 50269 - protein, 9 aa, synthetic construct
PIPAGLRLR

SEQ ID NO: 50270 - protein, 9 aa, synthetic construct
PIPAGLRLH

SEQ ID NO: 50271 - protein, 9 aa, synthetic construct
PIPAGLRLK

SEQ ID NO: 50272 - protein, 9 aa, synthetic construct
PIPAGLRLF

SEQ ID NO: 50273 - protein, 9 aa, synthetic construct
PIPAGLRVR

SEQ ID NO: 50274 - protein, 9 aa, synthetic construct
PIPAGLRVH

SEQ ID NO: 50275 - protein, 9 aa, synthetic construct
PIPAGLRVK

SEQ ID NO: 50276 - protein, 9 aa, synthetic construct
PIPAGLKLR

SEQ ID NO: 50277 - protein, 9 aa, synthetic construct
PIPAGLKLK

SEQ ID NO: 50278 - protein, 9 aa, synthetic construct
PIPAGLKVR

SEQ ID NO: 50279 - protein, 9 aa, synthetic construct
PIPAGLKVK

SEQ ID NO: 50280 - protein, 9 aa, synthetic construct
PIPAGARLR

SEQ ID NO: 50281 - protein, 9 aa, synthetic construct
PIPAGARLK

SEQ ID NO: 50282 - protein, 9 aa, synthetic construct
PIPAGARLF

SEQ ID NO: 50283 - protein, 9 aa, synthetic construct
PIPAGAKLK

SEQ ID NO: 50284 - protein, 9 aa, synthetic construct
PIPAGIRLK

SEQ ID NO: 50285 - protein, 9 aa, synthetic construct
PIPAGIRVK

SEQ ID NO: 50286 - protein, 9 aa, synthetic construct
PIPAGGRLR

SEQ ID NO: 50287 - protein, 9 aa, synthetic construct
PIPAGGRLK

SEQ ID NO: 50288 - protein, 9 aa, synthetic construct
PIPAGGKVR

SEQ ID NO: 50289 - protein, 9 aa, synthetic construct
GLNGAVRLR

SEQ ID NO: 50290 - protein, 9 aa, synthetic construct
GLNGAVRLK

SEQ ID NO: 50291 - protein, 9 aa, synthetic construct
GLNGAVRVK

SEQ ID NO: 50292 - protein, 9 aa, synthetic construct
GLNGAVKLR

SEQ ID NO: 50293 - protein, 9 aa, synthetic construct
GLNGAVKVR

SEQ ID NO: 50294 - protein, 9 aa, synthetic construct
GLNGALRLR

SEQ ID NO: 50295 - protein, 9 aa, synthetic construct
GLNGALRLK

SEQ ID NO: 50296 - protein, 9 aa, synthetic construct
GLNGALRLF

SEQ ID NO: 50297 - protein, 9 aa, synthetic construct
GLNGALRVY

SEQ ID NO: 50298 - protein, 9 aa, synthetic construct
GLNGALRVR

SEQ ID NO: 50299 - protein, 9 aa, synthetic construct
GLNGALKLY

SEQ ID NO: 50300 - protein, 9 aa, synthetic construct
GLNGALKLK

SEQ ID NO: 50301 - protein, 9 aa, synthetic construct
GLNGALKVR

SEQ ID NO: 50302 - protein, 9 aa, synthetic construct
GLNGAARLK

SEQ ID NO: 50303 - protein, 9 aa, synthetic construct
GLNGAARVK

SEQ ID NO: 50304 - protein, 9 aa, synthetic construct
GLNGAAKVR

SEQ ID NO: 50305 - protein, 9 aa, synthetic construct
GLNGAIRLK

SEQ ID NO: 50306 - protein, 9 aa, synthetic construct
GLNGAIRVR

SEQ ID NO: 50307 - protein, 9 aa, synthetic construct
GLNGAIKLR

SEQ ID NO: 50308 - protein, 9 aa, synthetic construct
GLNGAIKLK

SEQ ID NO: 50309 - protein, 9 aa, synthetic construct
GLNGAGRLR

SEQ ID NO: 50310 - protein, 9 aa, synthetic construct
GLNGAGRVR

SEQ ID NO: 50311 - protein, 9 aa, synthetic construct
GLNGAGKLK

SEQ ID NO: 50312 - protein, 9 aa, synthetic construct
GLNGAGKVR

SEQ ID NO: 50313 - protein, 9 aa, synthetic construct
GLNGTVHLF

SEQ ID NO: 50314 - protein, 9 aa, synthetic construct
GLNGTVRLR

SEQ ID NO: 50315 - protein, 9 aa, synthetic construct
GLNGTVRLK

SEQ ID NO: 50316 - protein, 9 aa, synthetic construct
GLNGTVRLF

SEQ ID NO: 50317 - protein, 9 aa, synthetic construct
GLNGTVRVR

SEQ ID NO: 50318 - protein, 9 aa, synthetic construct
GLNGTVRVK

SEQ ID NO: 50319 - protein, 9 aa, synthetic construct
GLNGTVKLR

SEQ ID NO: 50320 - protein, 9 aa, synthetic construct
GLNGTVKVR

SEQ ID NO: 50321 - protein, 9 aa, synthetic construct
GLNGTLRLR

SEQ ID NO: 50322 - protein, 9 aa, synthetic construct
GLNGTLRLK

SEQ ID NO: 50323 - protein, 9 aa, synthetic construct
GLNGTLRVR

SEQ ID NO: 50324 - protein, 9 aa, synthetic construct
GLNGTLRVK

SEQ ID NO: 50325 - protein, 9 aa, synthetic construct
GLNGTLRVF

SEQ ID NO: 50326 - protein, 9 aa, synthetic construct
GLNGTLKVR

SEQ ID NO: 50327 - protein, 9 aa, synthetic construct
GLNGTLKVK

SEQ ID NO: 50328 - protein, 9 aa, synthetic construct
GLNGTARLR

SEQ ID NO: 50329 - protein, 9 aa, synthetic construct
GLNGTARVR

SEQ ID NO: 50330 - protein, 9 aa, synthetic construct
GLNGTARVK

SEQ ID NO: 50331 - protein, 9 aa, synthetic construct
GLNGTAKLK

SEQ ID NO: 50332 - protein, 9 aa, synthetic construct
GLNGTAKVR

SEQ ID NO: 50333 - protein, 9 aa, synthetic construct
GLNGTIRLR

SEQ ID NO: 50334 - protein, 9 aa, synthetic construct
GLNGTIRLK

SEQ ID NO: 50335 - protein, 9 aa, synthetic construct
GLNGTIRVY

SEQ ID NO: 50336 - protein, 9 aa, synthetic construct
GLNGTIRVK

SEQ ID NO: 50337 - protein, 9 aa, synthetic construct
GLNGTIKLR

SEQ ID NO: 50338 - protein, 9 aa, synthetic construct
GLNGTIKLK

SEQ ID NO: 50339 - protein, 9 aa, synthetic construct
GLNGTGKLR

SEQ ID NO: 50340 - protein, 9 aa, synthetic construct
GLNGSVHLH

SEQ ID NO: 50341 - protein, 9 aa, synthetic construct
GLNGSVRLR

SEQ ID NO: 50342 - protein, 9 aa, synthetic construct
GLNGSVRLH

SEQ ID NO: 50343 - protein, 9 aa, synthetic construct
GLNGSVRLK

SEQ ID NO: 50344 - protein, 9 aa, synthetic construct
GLNGSVRLF

SEQ ID NO: 50345 - protein, 9 aa, synthetic construct
GLNGSVRVR

SEQ ID NO: 50346 - protein, 9 aa, synthetic construct
GLNGSVKLR

SEQ ID NO: 50347 - protein, 9 aa, synthetic construct
GLNGSVKLH

SEQ ID NO: 50348 - protein, 9 aa, synthetic construct
GLNGSVKVR

SEQ ID NO: 50349 - protein, 9 aa, synthetic construct
GLNGSLHLF

SEQ ID NO: 50350 - protein, 9 aa, synthetic construct
GLNGSLRLY

SEQ ID NO: 50351 - protein, 9 aa, synthetic construct
GLNGSLRLR

SEQ ID NO: 50352 - protein, 9 aa, synthetic construct
GLNGSLRLH

SEQ ID NO: 50353 - protein, 9 aa, synthetic construct
GLNGSLRLK

SEQ ID NO: 50354 - protein, 9 aa, synthetic construct
GLNGSLRLF

SEQ ID NO: 50355 - protein, 9 aa, synthetic construct
GLNGSLRVY

SEQ ID NO: 50356 - protein, 9 aa, synthetic construct
GLNGSLRVR

SEQ ID NO: 50357 - protein, 9 aa, synthetic construct
GLNGSLRVH

SEQ ID NO: 50358 - protein, 9 aa, synthetic construct
GLNGSLRVK

SEQ ID NO: 50359 - protein, 9 aa, synthetic construct
GLNGSLKLY

SEQ ID NO: 50360 - protein, 9 aa, synthetic construct
GLNGSLKLR

SEQ ID NO: 50361 - protein, 9 aa, synthetic construct
GLNGSLKLH

SEQ ID NO: 50362 - protein, 9 aa, synthetic construct
GLNGSLKLK

SEQ ID NO: 50363 - protein, 9 aa, synthetic construct
GLNGSLKVK

SEQ ID NO: 50364 - protein, 9 aa, synthetic construct
GLNGSARLR

SEQ ID NO: 50365 - protein, 9 aa, synthetic construct
GLNGSARLK

SEQ ID NO: 50366 - protein, 9 aa, synthetic construct
GLNGSARVR

SEQ ID NO: 50367 - protein, 9 aa, synthetic construct
GLNGSARVK

SEQ ID NO: 50368 - protein, 9 aa, synthetic construct
GLNGSAKLH

SEQ ID NO: 50369 - protein, 9 aa, synthetic construct
GLNGSAKLK

SEQ ID NO: 50370 - protein, 9 aa, synthetic construct
GLNGSAKVR

SEQ ID NO: 50371 - protein, 9 aa, synthetic construct
GLNGSAKVK

SEQ ID NO: 50372 - protein, 9 aa, synthetic construct
GLNGSIRLR

SEQ ID NO: 50373 - protein, 9 aa, synthetic construct
GLNGSIRLK

SEQ ID NO: 50374 - protein, 9 aa, synthetic construct
GLNGSIRVK

SEQ ID NO: 50375 - protein, 9 aa, synthetic construct
GLNGSIKLR

SEQ ID NO: 50376 - protein, 9 aa, synthetic construct
GLNGSIKLK

SEQ ID NO: 50377 - protein, 9 aa, synthetic construct
GLNGSIKVR

SEQ ID NO: 50378 - protein, 9 aa, synthetic construct
GLNGSGRLH

SEQ ID NO: 50379 - protein, 9 aa, synthetic construct
GLNGVVHVY

SEQ ID NO: 50380 - protein, 9 aa, synthetic construct
GLNGVVHVF

SEQ ID NO: 50381 - protein, 9 aa, synthetic construct
GLNGVVRLY

SEQ ID NO: 50382 - protein, 9 aa, synthetic construct
GLNGVVRLR

SEQ ID NO: 50383 - protein, 9 aa, synthetic construct
GLNGVVRLF

SEQ ID NO: 50384 - protein, 9 aa, synthetic construct
GLNGVVRVR

SEQ ID NO: 50385 - protein, 9 aa, synthetic construct
GLNGVVKVK

SEQ ID NO: 50386 - protein, 9 aa, synthetic construct
GLNGVLHLF

SEQ ID NO: 50387 - protein, 9 aa, synthetic construct
GLNGVLHVY

SEQ ID NO: 50388 - protein, 9 aa, synthetic construct
GLNGVLRLK

SEQ ID NO: 50389 - protein, 9 aa, synthetic construct
GLNGVLRVR

SEQ ID NO: 50390 - protein, 9 aa, synthetic construct
GLNGVLRVK

SEQ ID NO: 50391 - protein, 9 aa, synthetic construct
GLNGVLRVF

SEQ ID NO: 50392 - protein, 9 aa, synthetic construct
GLNGVLKLH

SEQ ID NO: 50393 - protein, 9 aa, synthetic construct
GLNGVLKLF

SEQ ID NO: 50394 - protein, 9 aa, synthetic construct
GLNGVLKVK

SEQ ID NO: 50395 - protein, 9 aa, synthetic construct
GLNGVARLR

SEQ ID NO: 50396 - protein, 9 aa, synthetic construct
GLNGVARLF

SEQ ID NO: 50397 - protein, 9 aa, synthetic construct
GLNGVARVY

SEQ ID NO: 50398 - protein, 9 aa, synthetic construct
GLNGVARVR

SEQ ID NO: 50399 - protein, 9 aa, synthetic construct
GLNGVARVH

SEQ ID NO: 50400 - protein, 9 aa, synthetic construct
GLNGVARVK

SEQ ID NO: 50401 - protein, 9 aa, synthetic construct
GLNGVARVF

SEQ ID NO: 50402 - protein, 9 aa, synthetic construct
GLNGVAKLR

SEQ ID NO: 50403 - protein, 9 aa, synthetic construct
GLNGVAKLK

SEQ ID NO: 50404 - protein, 9 aa, synthetic construct
GLNGVAKVR

SEQ ID NO: 50405 - protein, 9 aa, synthetic construct
GLNGVAKVK

SEQ ID NO: 50406 - protein, 9 aa, synthetic construct
GLNGVIRLR

SEQ ID NO: 50407 - protein, 9 aa, synthetic construct
GLNGVIRLH

SEQ ID NO: 50408 - protein, 9 aa, synthetic construct
GLNGVIRLK

SEQ ID NO: 50409 - protein, 9 aa, synthetic construct
GLNGVIRVR

SEQ ID NO: 50410 - protein, 9 aa, synthetic construct
GLNGVIRVF

SEQ ID NO: 50411 - protein, 9 aa, synthetic construct
GLNGVIKLY

SEQ ID NO: 50412 - protein, 9 aa, synthetic construct
GLNGVIKLR

SEQ ID NO: 50413 - protein, 9 aa, synthetic construct
GLNGVIKVR

SEQ ID NO: 50414 - protein, 9 aa, synthetic construct
GLNGVGHVR

SEQ ID NO: 50415 - protein, 9 aa, synthetic construct
GLNGVGRLR

SEQ ID NO: 50416 - protein, 9 aa, synthetic construct
GLNGVGRVR

SEQ ID NO: 50417 - protein, 9 aa, synthetic construct
GLNGVGRVH

SEQ ID NO: 50418 - protein, 9 aa, synthetic construct
GLNGVGKVK

SEQ ID NO: 50419 - protein, 9 aa, synthetic construct
GLNGGVHVH

SEQ ID NO: 50420 - protein, 9 aa, synthetic construct
GLNGGLHLY

SEQ ID NO: 50421 - protein, 9 aa, synthetic construct
GLNGGLHLH

SEQ ID NO: 50422 - protein, 9 aa, synthetic construct
GLNGGLRLY

SEQ ID NO: 50423 - protein, 9 aa, synthetic construct
GLNGGLRLR

SEQ ID NO: 50424 - protein, 9 aa, synthetic construct
GLNGGLRLH

SEQ ID NO: 50425 - protein, 9 aa, synthetic construct
GLNGGLRLK

SEQ ID NO: 50426 - protein, 9 aa, synthetic construct
GLNGGLRLF

SEQ ID NO: 50427 - protein, 9 aa, synthetic construct
GLNGGLRVY

SEQ ID NO: 50428 - protein, 9 aa, synthetic construct
GLNGGLRVH

SEQ ID NO: 50429 - protein, 9 aa, synthetic construct
GLNGGLRVK

SEQ ID NO: 50430 - protein, 9 aa, synthetic construct
GLNGGLRVF

SEQ ID NO: 50431 - protein, 9 aa, synthetic construct
GLNGGLKLR

SEQ ID NO: 50432 - protein, 9 aa, synthetic construct
GLNGGLKLK

SEQ ID NO: 50433 - protein, 9 aa, synthetic construct
GLNGGLKLF

SEQ ID NO: 50434 - protein, 9 aa, synthetic construct
GLNGGLKVR

SEQ ID NO: 50435 - protein, 9 aa, synthetic construct
GLNGGARLR

SEQ ID NO: 50436 - protein, 9 aa, synthetic construct
GLNGGARLK

SEQ ID NO: 50437 - protein, 9 aa, synthetic construct
GLNGGARVK

SEQ ID NO: 50438 - protein, 9 aa, synthetic construct
GLNGGAKLK

SEQ ID NO: 50439 - protein, 9 aa, synthetic construct
GLNGGAKVK

SEQ ID NO: 50440 - protein, 9 aa, synthetic construct
GLNGGIKVK

SEQ ID NO: 50441 - protein, 9 aa, synthetic construct
GLNGGGHVR

SEQ ID NO: 50442 - protein, 9 aa, synthetic construct
GLNGGGRLR

SEQ ID NO: 50443 - protein, 9 aa, synthetic construct
GLNAAVRLR

SEQ ID NO: 50444 - protein, 9 aa, synthetic construct
GLNAAVRLF

SEQ ID NO: 50445 - protein, 9 aa, synthetic construct
GLNAAVRVR

SEQ ID NO: 50446 - protein, 9 aa, synthetic construct
GLNAAVRVK

SEQ ID NO: 50447 - protein, 9 aa, synthetic construct
GLNAAVKVK

SEQ ID NO: 50448 - protein, 9 aa, synthetic construct
GLNAALHVF

SEQ ID NO: 50449 - protein, 9 aa, synthetic construct
GLNAALRLY

SEQ ID NO: 50450 - protein, 9 aa, synthetic construct
GLNAALRLR

SEQ ID NO: 50451 - protein, 9 aa, synthetic construct
GLNAALRLK

SEQ ID NO: 50452 - protein, 9 aa, synthetic construct
GLNAALRVY

SEQ ID NO: 50453 - protein, 9 aa, synthetic construct
GLNAALRVR

SEQ ID NO: 50454 - protein, 9 aa, synthetic construct
GLNAALRVK

SEQ ID NO: 50455 - protein, 9 aa, synthetic construct
GLNAAARLR

SEQ ID NO: 50456 - protein, 9 aa, synthetic construct
GLNAAARLK

SEQ ID NO: 50457 - protein, 9 aa, synthetic construct
GLNAAAKLR

SEQ ID NO: 50458 - protein, 9 aa, synthetic construct
GLNAAAKLK

SEQ ID NO: 50459 - protein, 9 aa, synthetic construct
GLNAAIRLK

SEQ ID NO: 50460 - protein, 9 aa, synthetic construct
GLNAAIRVR

SEQ ID NO: 50461 - protein, 9 aa, synthetic construct
GLNAAIRVK

SEQ ID NO: 50462 - protein, 9 aa, synthetic construct
GLNAAIKLR

SEQ ID NO: 50463 - protein, 9 aa, synthetic construct
GLNAAGRVR

SEQ ID NO: 50464 - protein, 9 aa, synthetic construct
GLNAAGRVK

SEQ ID NO: 50465 - protein, 9 aa, synthetic construct
GLNATVRLR

SEQ ID NO: 50466 - protein, 9 aa, synthetic construct
GLNATVRLH

SEQ ID NO: 50467 - protein, 9 aa, synthetic construct
GLNATVRLK

SEQ ID NO: 50468 - protein, 9 aa, synthetic construct
GLNATVRVR

SEQ ID NO: 50469 - protein, 9 aa, synthetic construct
GLNATVRVK

SEQ ID NO: 50470 - protein, 9 aa, synthetic construct
GLNATVKLK

SEQ ID NO: 50471 - protein, 9 aa, synthetic construct
GLNATVKVR

SEQ ID NO: 50472 - protein, 9 aa, synthetic construct
GLNATVKVK

SEQ ID NO: 50473 - protein, 9 aa, synthetic construct
GLNATLHVF

SEQ ID NO: 50474 - protein, 9 aa, synthetic construct
GLNATLRLY

SEQ ID NO: 50475 - protein, 9 aa, synthetic construct
GLNATLRLH

SEQ ID NO: 50476 - protein, 9 aa, synthetic construct
GLNATLRLF

SEQ ID NO: 50477 - protein, 9 aa, synthetic construct
GLNATLRVY

SEQ ID NO: 50478 - protein, 9 aa, synthetic construct
GLNATLRVR

SEQ ID NO: 50479 - protein, 9 aa, synthetic construct
GLNATLRVH

SEQ ID NO: 50480 - protein, 9 aa, synthetic construct
GLNATLRVK

SEQ ID NO: 50481 - protein, 9 aa, synthetic construct
GLNATLKVR

SEQ ID NO: 50482 - protein, 9 aa, synthetic construct
GLNATLKVK

SEQ ID NO: 50483 - protein, 9 aa, synthetic construct
GLNATARLR

SEQ ID NO: 50484 - protein, 9 aa, synthetic construct
GLNATARLK

SEQ ID NO: 50485 - protein, 9 aa, synthetic construct
GLNATAKVR

SEQ ID NO: 50486 - protein, 9 aa, synthetic construct
GLNATAKVK

SEQ ID NO: 50487 - protein, 9 aa, synthetic construct
GLNATIRLR

SEQ ID NO: 50488 - protein, 9 aa, synthetic construct
GLNATIRLK

SEQ ID NO: 50489 - protein, 9 aa, synthetic construct
GLNATIRVR

SEQ ID NO: 50490 - protein, 9 aa, synthetic construct
GLNATIRVK

SEQ ID NO: 50491 - protein, 9 aa, synthetic construct
GLNATIKLR

SEQ ID NO: 50492 - protein, 9 aa, synthetic construct
GLNATIKLK

SEQ ID NO: 50493 - protein, 9 aa, synthetic construct
GLNATIKVR

SEQ ID NO: 50494 - protein, 9 aa, synthetic construct
GLNATIKVK

SEQ ID NO: 50495 - protein, 9 aa, synthetic construct
GLNATGRLR

SEQ ID NO: 50496 - protein, 9 aa, synthetic construct
GLNATGRLK

SEQ ID NO: 50497 - protein, 9 aa, synthetic construct
GLNATGKLR

SEQ ID NO: 50498 - protein, 9 aa, synthetic construct
GLNATGKLK

SEQ ID NO: 50499 - protein, 9 aa, synthetic construct
GLNATGKVK

SEQ ID NO: 50500 - protein, 9 aa, synthetic construct
GLNASVHVH

SEQ ID NO: 50501 - protein, 9 aa, synthetic construct
GLNASVRLR

SEQ ID NO: 50502 - protein, 9 aa, synthetic construct
GLNASVRLK

SEQ ID NO: 50503 - protein, 9 aa, synthetic construct
GLNASVRVR

SEQ ID NO: 50504 - protein, 9 aa, synthetic construct
GLNASVKLR

SEQ ID NO: 50505 - protein, 9 aa, synthetic construct
GLNASLHLR

SEQ ID NO: 50506 - protein, 9 aa, synthetic construct
GLNASLHVH

SEQ ID NO: 50507 - protein, 9 aa, synthetic construct
GLNASLRLR

SEQ ID NO: 50508 - protein, 9 aa, synthetic construct
GLNASLRLK

SEQ ID NO: 50509 - protein, 9 aa, synthetic construct
GLNASLRLF

SEQ ID NO: 50510 - protein, 9 aa, synthetic construct
GLNASLRVY

SEQ ID NO: 50511 - protein, 9 aa, synthetic construct
GLNASLRVR

SEQ ID NO: 50512 - protein, 9 aa, synthetic construct
GLNASLRVK

SEQ ID NO: 50513 - protein, 9 aa, synthetic construct
GLNASLKLK

SEQ ID NO: 50514 - protein, 9 aa, synthetic construct
GLNASLKVR

SEQ ID NO: 50515 - protein, 9 aa, synthetic construct
GLNASLKVK

SEQ ID NO: 50516 - protein, 9 aa, synthetic construct
GLNASARLY

SEQ ID NO: 50517 - protein, 9 aa, synthetic construct
GLNASARLR

SEQ ID NO: 50518 - protein, 9 aa, synthetic construct
GLNASARLK

SEQ ID NO: 50519 - protein, 9 aa, synthetic construct
GLNASARVR

SEQ ID NO: 50520 - protein, 9 aa, synthetic construct
GLNASARVK

SEQ ID NO: 50521 - protein, 9 aa, synthetic construct
GLNASAKLK

SEQ ID NO: 50522 - protein, 9 aa, synthetic construct
GLNASAKVR

SEQ ID NO: 50523 - protein, 9 aa, synthetic construct
GLNASAKVK

SEQ ID NO: 50524 - protein, 9 aa, synthetic construct
GLNASIRLY

SEQ ID NO: 50525 - protein, 9 aa, synthetic construct
GLNASIRLH

SEQ ID NO: 50526 - protein, 9 aa, synthetic construct
GLNASIRVY

SEQ ID NO: 50527 - protein, 9 aa, synthetic construct
GLNASIRVR

SEQ ID NO: 50528 - protein, 9 aa, synthetic construct
GLNASIRVH

SEQ ID NO: 50529 - protein, 9 aa, synthetic construct
GLNASIRVK

SEQ ID NO: 50530 - protein, 9 aa, synthetic construct
GLNASIKLR

SEQ ID NO: 50531 - protein, 9 aa, synthetic construct
GLNASIKVR

SEQ ID NO: 50532 - protein, 9 aa, synthetic construct
GLNASIKVK

SEQ ID NO: 50533 - protein, 9 aa, synthetic construct
GLNASGHVR

SEQ ID NO: 50534 - protein, 9 aa, synthetic construct
GLNASGRLK

SEQ ID NO: 50535 - protein, 9 aa, synthetic construct
GLNASGRVK

SEQ ID NO: 50536 - protein, 9 aa, synthetic construct
GLNASGKLR

SEQ ID NO: 50537 - protein, 9 aa, synthetic construct
GLNASGKLK

SEQ ID NO: 50538 - protein, 9 aa, synthetic construct
GLNASGKVR

SEQ ID NO: 50539 - protein, 9 aa, synthetic construct
GLNASGKVK

SEQ ID NO: 50540 - protein, 9 aa, synthetic construct
GLNAVVRLY

SEQ ID NO: 50541 - protein, 9 aa, synthetic construct
GLNAVVRLR

SEQ ID NO: 50542 - protein, 9 aa, synthetic construct
GLNAVVRLF

SEQ ID NO: 50543 - protein, 9 aa, synthetic construct
GLNAVVRVY

SEQ ID NO: 50544 - protein, 9 aa, synthetic construct
GLNAVVKLR

SEQ ID NO: 50545 - protein, 9 aa, synthetic construct
GLNAVVKLK

SEQ ID NO: 50546 - protein, 9 aa, synthetic construct
GLNAVVKVR

SEQ ID NO: 50547 - protein, 9 aa, synthetic construct
GLNAVVKVK

SEQ ID NO: 50548 - protein, 9 aa, synthetic construct
GLNAVLHLR

SEQ ID NO: 50549 - protein, 9 aa, synthetic construct
GLNAVLHLK

SEQ ID NO: 50550 - protein, 9 aa, synthetic construct
GLNAVLHLF

SEQ ID NO: 50551 - protein, 9 aa, synthetic construct
GLNAVLHVY

SEQ ID NO: 50552 - protein, 9 aa, synthetic construct
GLNAVLHVR

SEQ ID NO: 50553 - protein, 9 aa, synthetic construct
GLNAVLHVK

SEQ ID NO: 50554 - protein, 9 aa, synthetic construct
GLNAVLRLY

SEQ ID NO: 50555 - protein, 9 aa, synthetic construct
GLNAVLRLR

SEQ ID NO: 50556 - protein, 9 aa, synthetic construct
GLNAVLRLH

SEQ ID NO: 50557 - protein, 9 aa, synthetic construct
GLNAVLRLK

SEQ ID NO: 50558 - protein, 9 aa, synthetic construct
GLNAVLRVY

SEQ ID NO: 50559 - protein, 9 aa, synthetic construct
GLNAVLRVR

SEQ ID NO: 50560 - protein, 9 aa, synthetic construct
GLNAVLRVK

SEQ ID NO: 50561 - protein, 9 aa, synthetic construct
GLNAVLRVF

SEQ ID NO: 50562 - protein, 9 aa, synthetic construct
GLNAVLKLF

SEQ ID NO: 50563 - protein, 9 aa, synthetic construct
GLNAVAHLR

SEQ ID NO: 50564 - protein, 9 aa, synthetic construct
GLNAVAHLF

SEQ ID NO: 50565 - protein, 9 aa, synthetic construct
GLNAVAHVR

SEQ ID NO: 50566 - protein, 9 aa, synthetic construct
GLNAVAHVF

SEQ ID NO: 50567 - protein, 9 aa, synthetic construct
GLNAVARLY

SEQ ID NO: 50568 - protein, 9 aa, synthetic construct
GLNAVARLR

SEQ ID NO: 50569 - protein, 9 aa, synthetic construct
GLNAVARLH

SEQ ID NO: 50570 - protein, 9 aa, synthetic construct
GLNAVARLK

SEQ ID NO: 50571 - protein, 9 aa, synthetic construct
GLNAVARLF

SEQ ID NO: 50572 - protein, 9 aa, synthetic construct
GLNAVARVY

SEQ ID NO: 50573 - protein, 9 aa, synthetic construct
GLNAVARVR

SEQ ID NO: 50574 - protein, 9 aa, synthetic construct
GLNAVARVH

SEQ ID NO: 50575 - protein, 9 aa, synthetic construct
GLNAVARVK

SEQ ID NO: 50576 - protein, 9 aa, synthetic construct
GLNAVAKLR

SEQ ID NO: 50577 - protein, 9 aa, synthetic construct
GLNAVAKVK

SEQ ID NO: 50578 - protein, 9 aa, synthetic construct
GLNAVIHLY

SEQ ID NO: 50579 - protein, 9 aa, synthetic construct
GLNAVIHLF

SEQ ID NO: 50580 - protein, 9 aa, synthetic construct
GLNAVIRLR

SEQ ID NO: 50581 - protein, 9 aa, synthetic construct
GLNAVIRLH

SEQ ID NO: 50582 - protein, 9 aa, synthetic construct
GLNAVIRLF

SEQ ID NO: 50583 - protein, 9 aa, synthetic construct
GLNAVIRVR

SEQ ID NO: 50584 - protein, 9 aa, synthetic construct
GLNAVIRVH

SEQ ID NO: 50585 - protein, 9 aa, synthetic construct
GLNAVIRVK

SEQ ID NO: 50586 - protein, 9 aa, synthetic construct
GLNAVIKLY

SEQ ID NO: 50587 - protein, 9 aa, synthetic construct
GLNAVIKLR

SEQ ID NO: 50588 - protein, 9 aa, synthetic construct
GLNAVIKVY

SEQ ID NO: 50589 - protein, 9 aa, synthetic construct
GLNAVIKVR

SEQ ID NO: 50590 - protein, 9 aa, synthetic construct
GLNAVIKVK

SEQ ID NO: 50591 - protein, 9 aa, synthetic construct
GLNAVGHLY

SEQ ID NO: 50592 - protein, 9 aa, synthetic construct
GLNAVGRLR

SEQ ID NO: 50593 - protein, 9 aa, synthetic construct
GLNAVGRLK

SEQ ID NO: 50594 - protein, 9 aa, synthetic construct
GLNAVGRVR

SEQ ID NO: 50595 - protein, 9 aa, synthetic construct
GLNAVGRVK

SEQ ID NO: 50596 - protein, 9 aa, synthetic construct
GLNAVGKLK

SEQ ID NO: 50597 - protein, 9 aa, synthetic construct
GLNAGVHLR

SEQ ID NO: 50598 - protein, 9 aa, synthetic construct
GLNAGVHLH

SEQ ID NO: 50599 - protein, 9 aa, synthetic construct
GLNAGVHLF

SEQ ID NO: 50600 - protein, 9 aa, synthetic construct
GLNAGVHVH

SEQ ID NO: 50601 - protein, 9 aa, synthetic construct
GLNAGVRLR

SEQ ID NO: 50602 - protein, 9 aa, synthetic construct
GLNAGVRLK

SEQ ID NO: 50603 - protein, 9 aa, synthetic construct
GLNAGVKLK

SEQ ID NO: 50604 - protein, 9 aa, synthetic construct
GLNAGVKVR

SEQ ID NO: 50605 - protein, 9 aa, synthetic construct
GLNAGLHLY

SEQ ID NO: 50606 - protein, 9 aa, synthetic construct
GLNAGLHLR

SEQ ID NO: 50607 - protein, 9 aa, synthetic construct
GLNAGLHLH

SEQ ID NO: 50608 - protein, 9 aa, synthetic construct
GLNAGLHLK

SEQ ID NO: 50609 - protein, 9 aa, synthetic construct
GLNAGLHLF

SEQ ID NO: 50610 - protein, 9 aa, synthetic construct
GLNAGLHVY

SEQ ID NO: 50611 - protein, 9 aa, synthetic construct
GLNAGLHVR

SEQ ID NO: 50612 - protein, 9 aa, synthetic construct
GLNAGLHVK

SEQ ID NO: 50613 - protein, 9 aa, synthetic construct
GLNAGLHVF

SEQ ID NO: 50614 - protein, 9 aa, synthetic construct
GLNAGLRLY

SEQ ID NO: 50615 - protein, 9 aa, synthetic construct
GLNAGLRLR

SEQ ID NO: 50616 - protein, 9 aa, synthetic construct
GLNAGLRLH

SEQ ID NO: 50617 - protein, 9 aa, synthetic construct
GLNAGLRLK

SEQ ID NO: 50618 - protein, 9 aa, synthetic construct
GLNAGLRLF

SEQ ID NO: 50619 - protein, 9 aa, synthetic construct
GLNAGLRVY

SEQ ID NO: 50620 - protein, 9 aa, synthetic construct
GLNAGLRVR

SEQ ID NO: 50621 - protein, 9 aa, synthetic construct
GLNAGLRVK

SEQ ID NO: 50622 - protein, 9 aa, synthetic construct
GLNAGLKLY

SEQ ID NO: 50623 - protein, 9 aa, synthetic construct
GLNAGLKLR

SEQ ID NO: 50624 - protein, 9 aa, synthetic construct
GLNAGLKLK

SEQ ID NO: 50625 - protein, 9 aa, synthetic construct
GLNAGLKVR

SEQ ID NO: 50626 - protein, 9 aa, synthetic construct
GLNAGLKVK

SEQ ID NO: 50627 - protein, 9 aa, synthetic construct
GLNAGARLR

SEQ ID NO: 50628 - protein, 9 aa, synthetic construct
GLNAGARLK

SEQ ID NO: 50629 - protein, 9 aa, synthetic construct
GLNAGARVH

SEQ ID NO: 50630 - protein, 9 aa, synthetic construct
GLNAGAKLR

SEQ ID NO: 50631 - protein, 9 aa, synthetic construct
GLNAGAKLK

SEQ ID NO: 50632 - protein, 9 aa, synthetic construct
GLNAGAKVR

SEQ ID NO: 50633 - protein, 9 aa, synthetic construct
GLNAGAKVK

SEQ ID NO: 50634 - protein, 9 aa, synthetic construct
GLNAGIRLR

SEQ ID NO: 50635 - protein, 9 aa, synthetic construct
GLNAGIRLK

SEQ ID NO: 50636 - protein, 9 aa, synthetic construct
GLNAGIRVR

SEQ ID NO: 50637 - protein, 9 aa, synthetic construct
GLNAGIRVK

SEQ ID NO: 50638 - protein, 9 aa, synthetic construct
GLNAGIKLR

SEQ ID NO: 50639 - protein, 9 aa, synthetic construct
GLNAGIKVK

SEQ ID NO: 50640 - protein, 9 aa, synthetic construct
GLNAGGKLR

SEQ ID NO: 50641 - protein, 9 aa, synthetic construct
GLNAGGKLK

SEQ ID NO: 50642 - protein, 9 aa, synthetic construct
GLNAGGKVK

SEQ ID NO: 50643 - protein, 9 aa, synthetic construct
GLQGAVRLR

SEQ ID NO: 50644 - protein, 9 aa, synthetic construct
GLQGAVRLK

SEQ ID NO: 50645 - protein, 9 aa, synthetic construct
GLQGAVRVR

SEQ ID NO: 50646 - protein, 9 aa, synthetic construct
GLQGAVRVK

SEQ ID NO: 50647 - protein, 9 aa, synthetic construct
GLQGAVKLR

SEQ ID NO: 50648 - protein, 9 aa, synthetic construct
GLQGAVKVR

SEQ ID NO: 50649 - protein, 9 aa, synthetic construct
GLQGALRLY

SEQ ID NO: 50650 - protein, 9 aa, synthetic construct
GLQGALRLR

SEQ ID NO: 50651 - protein, 9 aa, synthetic construct
GLQGALRLK

SEQ ID NO: 50652 - protein, 9 aa, synthetic construct
GLQGALRVR

SEQ ID NO: 50653 - protein, 9 aa, synthetic construct
GLQGALRVH

SEQ ID NO: 50654 - protein, 9 aa, synthetic construct
GLQGALRVK

SEQ ID NO: 50655 - protein, 9 aa, synthetic construct
GLQGALKLR

SEQ ID NO: 50656 - protein, 9 aa, synthetic construct
GLQGALKLK

SEQ ID NO: 50657 - protein, 9 aa, synthetic construct
GLQGALKVR

SEQ ID NO: 50658 - protein, 9 aa, synthetic construct
GLQGALKVK

SEQ ID NO: 50659 - protein, 9 aa, synthetic construct
GLQGAARLR

SEQ ID NO: 50660 - protein, 9 aa, synthetic construct
GLQGAARLK

SEQ ID NO: 50661 - protein, 9 aa, synthetic construct
GLQGAARVR

SEQ ID NO: 50662 - protein, 9 aa, synthetic construct
GLQGAARVK

SEQ ID NO: 50663 - protein, 9 aa, synthetic construct
GLQGAAKLR

SEQ ID NO: 50664 - protein, 9 aa, synthetic construct
GLQGAAKVK

SEQ ID NO: 50665 - protein, 9 aa, synthetic construct
GLQGAIRLR

SEQ ID NO: 50666 - protein, 9 aa, synthetic construct
GLQGAIRLK

SEQ ID NO: 50667 - protein, 9 aa, synthetic construct
GLQGAIKVR

SEQ ID NO: 50668 - protein, 9 aa, synthetic construct
GLQGAGRLR

SEQ ID NO: 50669 - protein, 9 aa, synthetic construct
GLQGAGRLK

SEQ ID NO: 50670 - protein, 9 aa, synthetic construct
GLQGAGRVR

SEQ ID NO: 50671 - protein, 9 aa, synthetic construct
GLQGAGKLR

SEQ ID NO: 50672 - protein, 9 aa, synthetic construct
GLQGAGKLK

SEQ ID NO: 50673 - protein, 9 aa, synthetic construct
GLQGAGKVR

SEQ ID NO: 50674 - protein, 9 aa, synthetic construct
GLQGTVRLR

SEQ ID NO: 50675 - protein, 9 aa, synthetic construct
GLQGTVRLK

SEQ ID NO: 50676 - protein, 9 aa, synthetic construct
GLQGTVRLF

SEQ ID NO: 50677 - protein, 9 aa, synthetic construct
GLQGTVRVR

SEQ ID NO: 50678 - protein, 9 aa, synthetic construct
GLQGTVRVK

SEQ ID NO: 50679 - protein, 9 aa, synthetic construct
GLQGTVKLR

SEQ ID NO: 50680 - protein, 9 aa, synthetic construct
GLQGTLHLR

SEQ ID NO: 50681 - protein, 9 aa, synthetic construct
GLQGTLHLF

SEQ ID NO: 50682 - protein, 9 aa, synthetic construct
GLQGTLRLR

SEQ ID NO: 50683 - protein, 9 aa, synthetic construct
GLQGTLRLK

SEQ ID NO: 50684 - protein, 9 aa, synthetic construct
GLQGTLRVR

SEQ ID NO: 50685 - protein, 9 aa, synthetic construct
GLQGTLRVH

SEQ ID NO: 50686 - protein, 9 aa, synthetic construct
GLQGTLRVK

SEQ ID NO: 50687 - protein, 9 aa, synthetic construct
GLQGTLRVF

SEQ ID NO: 50688 - protein, 9 aa, synthetic construct
GLQGTLKLK

SEQ ID NO: 50689 - protein, 9 aa, synthetic construct
GLQGTLKVR

SEQ ID NO: 50690 - protein, 9 aa, synthetic construct
GLQGTLKVK

SEQ ID NO: 50691 - protein, 9 aa, synthetic construct
GLQGTARLR

SEQ ID NO: 50692 - protein, 9 aa, synthetic construct
GLQGTARLK

SEQ ID NO: 50693 - protein, 9 aa, synthetic construct
GLQGTARVK

SEQ ID NO: 50694 - protein, 9 aa, synthetic construct
GLQGTIRLR

SEQ ID NO: 50695 - protein, 9 aa, synthetic construct
GLQGTIRLK

SEQ ID NO: 50696 - protein, 9 aa, synthetic construct
GLQGTIRVR

SEQ ID NO: 50697 - protein, 9 aa, synthetic construct
GLQGTIRVK

SEQ ID NO: 50698 - protein, 9 aa, synthetic construct
GLQGTIKLK

SEQ ID NO: 50699 - protein, 9 aa, synthetic construct
GLQGTIKVR

SEQ ID NO: 50700 - protein, 9 aa, synthetic construct
GLQGTIKVK

SEQ ID NO: 50701 - protein, 9 aa, synthetic construct
GLQGTGRLR

SEQ ID NO: 50702 - protein, 9 aa, synthetic construct
GLQGTGRLK

SEQ ID NO: 50703 - protein, 9 aa, synthetic construct
GLQGTGRVR

SEQ ID NO: 50704 - protein, 9 aa, synthetic construct
GLQGTGRVK

SEQ ID NO: 50705 - protein, 9 aa, synthetic construct
GLQGTGKLR

SEQ ID NO: 50706 - protein, 9 aa, synthetic construct
GLQGTGKLK

SEQ ID NO: 50707 - protein, 9 aa, synthetic construct
GLQGSVHLH

SEQ ID NO: 50708 - protein, 9 aa, synthetic construct
GLQGSVHVH

SEQ ID NO: 50709 - protein, 9 aa, synthetic construct
GLQGSVRLR

SEQ ID NO: 50710 - protein, 9 aa, synthetic construct
GLQGSVRLK

SEQ ID NO: 50711 - protein, 9 aa, synthetic construct
GLQGSVRVR

SEQ ID NO: 50712 - protein, 9 aa, synthetic construct
GLQGSVRVK

SEQ ID NO: 50713 - protein, 9 aa, synthetic construct
GLQGSVKLK

SEQ ID NO: 50714 - protein, 9 aa, synthetic construct
GLQGSVKVK

SEQ ID NO: 50715 - protein, 9 aa, synthetic construct
GLQGSLHLY

SEQ ID NO: 50716 - protein, 9 aa, synthetic construct
GLQGSLHLK

SEQ ID NO: 50717 - protein, 9 aa, synthetic construct
GLQGSLHVK

SEQ ID NO: 50718 - protein, 9 aa, synthetic construct
GLQGSLRLR

SEQ ID NO: 50719 - protein, 9 aa, synthetic construct
GLQGSLRLH

SEQ ID NO: 50720 - protein, 9 aa, synthetic construct
GLQGSLRLK

SEQ ID NO: 50721 - protein, 9 aa, synthetic construct
GLQGSLRLF

SEQ ID NO: 50722 - protein, 9 aa, synthetic construct
GLQGSLRVR

SEQ ID NO: 50723 - protein, 9 aa, synthetic construct
GLQGSLRVK

SEQ ID NO: 50724 - protein, 9 aa, synthetic construct
GLQGSLRVF

SEQ ID NO: 50725 - protein, 9 aa, synthetic construct
GLQGSLKLR

SEQ ID NO: 50726 - protein, 9 aa, synthetic construct
GLQGSLKLK

SEQ ID NO: 50727 - protein, 9 aa, synthetic construct
GLQGSLKLF

SEQ ID NO: 50728 - protein, 9 aa, synthetic construct
GLQGSLKVY

SEQ ID NO: 50729 - protein, 9 aa, synthetic construct
GLQGSLKVR

SEQ ID NO: 50730 - protein, 9 aa, synthetic construct
GLQGSLKVK

SEQ ID NO: 50731 - protein, 9 aa, synthetic construct
GLQGSARLR

SEQ ID NO: 50732 - protein, 9 aa, synthetic construct
GLQGSARLK

SEQ ID NO: 50733 - protein, 9 aa, synthetic construct
GLQGSARVR

SEQ ID NO: 50734 - protein, 9 aa, synthetic construct
GLQGSARVK

SEQ ID NO: 50735 - protein, 9 aa, synthetic construct
GLQGSAKLR

SEQ ID NO: 50736 - protein, 9 aa, synthetic construct
GLQGSAKLH

SEQ ID NO: 50737 - protein, 9 aa, synthetic construct
GLQGSAKLK

SEQ ID NO: 50738 - protein, 9 aa, synthetic construct
GLQGSAKVR

SEQ ID NO: 50739 - protein, 9 aa, synthetic construct
GLQGSAKVK

SEQ ID NO: 50740 - protein, 9 aa, synthetic construct
GLQGSIRLR

SEQ ID NO: 50741 - protein, 9 aa, synthetic construct
GLQGSIRLH

SEQ ID NO: 50742 - protein, 9 aa, synthetic construct
GLQGSIRVR

SEQ ID NO: 50743 - protein, 9 aa, synthetic construct
GLQGSIRVK

SEQ ID NO: 50744 - protein, 9 aa, synthetic construct
GLQGSIKLR

SEQ ID NO: 50745 - protein, 9 aa, synthetic construct
GLQGSIKLK

SEQ ID NO: 50746 - protein, 9 aa, synthetic construct
GLQGSIKVK

SEQ ID NO: 50747 - protein, 9 aa, synthetic construct
GLQGSGHLK

SEQ ID NO: 50748 - protein, 9 aa, synthetic construct
GLQGSGHVY

SEQ ID NO: 50749 - protein, 9 aa, synthetic construct
GLQGSGRLR

SEQ ID NO: 50750 - protein, 9 aa, synthetic construct
GLQGSGRLH

SEQ ID NO: 50751 - protein, 9 aa, synthetic construct
GLQGSGRVR

SEQ ID NO: 50752 - protein, 9 aa, synthetic construct
GLQGSGRVK

SEQ ID NO: 50753 - protein, 9 aa, synthetic construct
GLQGSGKLR

SEQ ID NO: 50754 - protein, 9 aa, synthetic construct
GLQGSGKLK

SEQ ID NO: 50755 - protein, 9 aa, synthetic construct
GLQGSGKVR

SEQ ID NO: 50756 - protein, 9 aa, synthetic construct
GLQGVVHLR

SEQ ID NO: 50757 - protein, 9 aa, synthetic construct
GLQGVVRLR

SEQ ID NO: 50758 - protein, 9 aa, synthetic construct
GLQGVVRLK

SEQ ID NO: 50759 - protein, 9 aa, synthetic construct
GLQGVVRVY

SEQ ID NO: 50760 - protein, 9 aa, synthetic construct
GLQGVVRVR

SEQ ID NO: 50761 - protein, 9 aa, synthetic construct
GLQGVVRVK

SEQ ID NO: 50762 - protein, 9 aa, synthetic construct
GLQGVVKLR

SEQ ID NO: 50763 - protein, 9 aa, synthetic construct
GLQGVVKLK

SEQ ID NO: 50764 - protein, 9 aa, synthetic construct
GLQGVLHLR

SEQ ID NO: 50765 - protein, 9 aa, synthetic construct
GLQGVLHLK

SEQ ID NO: 50766 - protein, 9 aa, synthetic construct
GLQGVLHLF

SEQ ID NO: 50767 - protein, 9 aa, synthetic construct
GLQGVLRLY

SEQ ID NO: 50768 - protein, 9 aa, synthetic construct
GLQGVLRLH

SEQ ID NO: 50769 - protein, 9 aa, synthetic construct
GLQGVLRLK

SEQ ID NO: 50770 - protein, 9 aa, synthetic construct
GLQGVLRLF

SEQ ID NO: 50771 - protein, 9 aa, synthetic construct
GLQGVLRVR

SEQ ID NO: 50772 - protein, 9 aa, synthetic construct
GLQGVLRVK

SEQ ID NO: 50773 - protein, 9 aa, synthetic construct
GLQGVLRVF

SEQ ID NO: 50774 - protein, 9 aa, synthetic construct
GLQGVLKLR

SEQ ID NO: 50775 - protein, 9 aa, synthetic construct
GLQGVLKLK

SEQ ID NO: 50776 - protein, 9 aa, synthetic construct
GLQGVLKVR

SEQ ID NO: 50777 - protein, 9 aa, synthetic construct
GLQGVARLY

SEQ ID NO: 50778 - protein, 9 aa, synthetic construct
GLQGVARLR

SEQ ID NO: 50779 - protein, 9 aa, synthetic construct
GLQGVARVR

SEQ ID NO: 50780 - protein, 9 aa, synthetic construct
GLQGVARVK

SEQ ID NO: 50781 - protein, 9 aa, synthetic construct
GLQGVAKLR

SEQ ID NO: 50782 - protein, 9 aa, synthetic construct
GLQGVAKLK

SEQ ID NO: 50783 - protein, 9 aa, synthetic construct
GLQGVIHLF

SEQ ID NO: 50784 - protein, 9 aa, synthetic construct
GLQGVIHVR

SEQ ID NO: 50785 - protein, 9 aa, synthetic construct
GLQGVIRLR

SEQ ID NO: 50786 - protein, 9 aa, synthetic construct
GLQGVIRLH

SEQ ID NO: 50787 - protein, 9 aa, synthetic construct
GLQGVIRLK

SEQ ID NO: 50788 - protein, 9 aa, synthetic construct
GLQGVIRVY

SEQ ID NO: 50789 - protein, 9 aa, synthetic construct
GLQGVIRVR

SEQ ID NO: 50790 - protein, 9 aa, synthetic construct
GLQGVIKLY

SEQ ID NO: 50791 - protein, 9 aa, synthetic construct
GLQGVIKLR

SEQ ID NO: 50792 - protein, 9 aa, synthetic construct
GLQGVIKLK

SEQ ID NO: 50793 - protein, 9 aa, synthetic construct
GLQGVGRLR

SEQ ID NO: 50794 - protein, 9 aa, synthetic construct
GLQGVGRLK

SEQ ID NO: 50795 - protein, 9 aa, synthetic construct
GLQGVGRVR

SEQ ID NO: 50796 - protein, 9 aa, synthetic construct
GLQGVGRVK

SEQ ID NO: 50797 - protein, 9 aa, synthetic construct
GLQGVGKVR

SEQ ID NO: 50798 - protein, 9 aa, synthetic construct
GLQGVGKVK

SEQ ID NO: 50799 - protein, 9 aa, synthetic construct
GLQGGVHLF

SEQ ID NO: 50800 - protein, 9 aa, synthetic construct
GLQGGVHVH

SEQ ID NO: 50801 - protein, 9 aa, synthetic construct
GLQGGVRLY

SEQ ID NO: 50802 - protein, 9 aa, synthetic construct
GLQGGVRLH

SEQ ID NO: 50803 - protein, 9 aa, synthetic construct
GLQGGVRLK

SEQ ID NO: 50804 - protein, 9 aa, synthetic construct
GLQGGVRVY

SEQ ID NO: 50805 - protein, 9 aa, synthetic construct
GLQGGVRVR

SEQ ID NO: 50806 - protein, 9 aa, synthetic construct
GLQGGVRVH

SEQ ID NO: 50807 - protein, 9 aa, synthetic construct
GLQGGVRVK

SEQ ID NO: 50808 - protein, 9 aa, synthetic construct
GLQGGVKLR

SEQ ID NO: 50809 - protein, 9 aa, synthetic construct
GLQGGVKLH

SEQ ID NO: 50810 - protein, 9 aa, synthetic construct
GLQGGVKLK

SEQ ID NO: 50811 - protein, 9 aa, synthetic construct
GLQGGVKVR

SEQ ID NO: 50812 - protein, 9 aa, synthetic construct
GLQGGLHLY

SEQ ID NO: 50813 - protein, 9 aa, synthetic construct
GLQGGLHLH

SEQ ID NO: 50814 - protein, 9 aa, synthetic construct
GLQGGLHLF

SEQ ID NO: 50815 - protein, 9 aa, synthetic construct
GLQGGLRLY

SEQ ID NO: 50816 - protein, 9 aa, synthetic construct
GLQGGLRLR

SEQ ID NO: 50817 - protein, 9 aa, synthetic construct
GLQGGLRLH

SEQ ID NO: 50818 - protein, 9 aa, synthetic construct
GLQGGLRLK

SEQ ID NO: 50819 - protein, 9 aa, synthetic construct
GLQGGLRVY

SEQ ID NO: 50820 - protein, 9 aa, synthetic construct
GLQGGLRVR

SEQ ID NO: 50821 - protein, 9 aa, synthetic construct
GLQGGLRVH

SEQ ID NO: 50822 - protein, 9 aa, synthetic construct
GLQGGLRVF

SEQ ID NO: 50823 - protein, 9 aa, synthetic construct
GLQGGLKLR

SEQ ID NO: 50824 - protein, 9 aa, synthetic construct
GLQGGLKLH

SEQ ID NO: 50825 - protein, 9 aa, synthetic construct
GLQGGLKLK

SEQ ID NO: 50826 - protein, 9 aa, synthetic construct
GLQGGARLR

SEQ ID NO: 50827 - protein, 9 aa, synthetic construct
GLQGGARLK

SEQ ID NO: 50828 - protein, 9 aa, synthetic construct
GLQGGARVY

SEQ ID NO: 50829 - protein, 9 aa, synthetic construct
GLQGGARVR

SEQ ID NO: 50830 - protein, 9 aa, synthetic construct
GLQGGARVK

SEQ ID NO: 50831 - protein, 9 aa, synthetic construct
GLQGGAKLR

SEQ ID NO: 50832 - protein, 9 aa, synthetic construct
GLQGGAKLK

SEQ ID NO: 50833 - protein, 9 aa, synthetic construct
GLQGGAKVK

SEQ ID NO: 50834 - protein, 9 aa, synthetic construct
GLQGGIRLR

SEQ ID NO: 50835 - protein, 9 aa, synthetic construct
GLQGGIRLH

SEQ ID NO: 50836 - protein, 9 aa, synthetic construct
GLQGGIRVH

SEQ ID NO: 50837 - protein, 9 aa, synthetic construct
GLQGGIRVK

SEQ ID NO: 50838 - protein, 9 aa, synthetic construct
GLQGGIKLR

SEQ ID NO: 50839 - protein, 9 aa, synthetic construct
GLQGGGHVK

SEQ ID NO: 50840 - protein, 9 aa, synthetic construct
GLQGGGRLR

SEQ ID NO: 50841 - protein, 9 aa, synthetic construct
GLQGGGRLK

SEQ ID NO: 50842 - protein, 9 aa, synthetic construct
GLQGGGRVR

SEQ ID NO: 50843 - protein, 9 aa, synthetic construct
GLQGGGKLR

SEQ ID NO: 50844 - protein, 9 aa, synthetic construct
GLQGGGKLK

SEQ ID NO: 50845 - protein, 9 aa, synthetic construct
GLQGGGKVR

SEQ ID NO: 50846 - protein, 9 aa, synthetic construct
GLQGGGKVK

SEQ ID NO: 50847 - protein, 9 aa, synthetic construct
GLQAAVHLH

SEQ ID NO: 50848 - protein, 9 aa, synthetic construct
GLQAAVRLR

SEQ ID NO: 50849 - protein, 9 aa, synthetic construct
GLQAAVRLF

SEQ ID NO: 50850 - protein, 9 aa, synthetic construct
GLQAAVKLK

SEQ ID NO: 50851 - protein, 9 aa, synthetic construct
GLQAAVKVR

SEQ ID NO: 50852 - protein, 9 aa, synthetic construct
GLQAALHLY

SEQ ID NO: 50853 - protein, 9 aa, synthetic construct
GLQAALHLR

SEQ ID NO: 50854 - protein, 9 aa, synthetic construct
GLQAALHLK

SEQ ID NO: 50855 - protein, 9 aa, synthetic construct
GLQAALHLF

SEQ ID NO: 50856 - protein, 9 aa, synthetic construct
GLQAALHVR

SEQ ID NO: 50857 - protein, 9 aa, synthetic construct
GLQAALHVF

SEQ ID NO: 50858 - protein, 9 aa, synthetic construct
GLQAALRLK

SEQ ID NO: 50859 - protein, 9 aa, synthetic construct
GLQAALRLF

SEQ ID NO: 50860 - protein, 9 aa, synthetic construct
GLQAALRVR

SEQ ID NO: 50861 - protein, 9 aa, synthetic construct
GLQAALRVK

SEQ ID NO: 50862 - protein, 9 aa, synthetic construct
GLQAALKLF

SEQ ID NO: 50863 - protein, 9 aa, synthetic construct
GLQAALKVR

SEQ ID NO: 50864 - protein, 9 aa, synthetic construct
GLQAAARLR

SEQ ID NO: 50865 - protein, 9 aa, synthetic construct
GLQAAARVK

SEQ ID NO: 50866 - protein, 9 aa, synthetic construct
GLQAAAKLR

SEQ ID NO: 50867 - protein, 9 aa, synthetic construct
GLQAAAKLK

SEQ ID NO: 50868 - protein, 9 aa, synthetic construct
GLQAAAKVR

SEQ ID NO: 50869 - protein, 9 aa, synthetic construct
GLQAAIHLF

SEQ ID NO: 50870 - protein, 9 aa, synthetic construct
GLQAAIRLY

SEQ ID NO: 50871 - protein, 9 aa, synthetic construct
GLQAAIRLR

SEQ ID NO: 50872 - protein, 9 aa, synthetic construct
GLQAAIRLH

SEQ ID NO: 50873 - protein, 9 aa, synthetic construct
GLQAAIRLF

SEQ ID NO: 50874 - protein, 9 aa, synthetic construct
GLQAAIRVK

SEQ ID NO: 50875 - protein, 9 aa, synthetic construct
GLQAAIKLR

SEQ ID NO: 50876 - protein, 9 aa, synthetic construct
GLQAAGHLH

SEQ ID NO: 50877 - protein, 9 aa, synthetic construct
GLQAAGRLR

SEQ ID NO: 50878 - protein, 9 aa, synthetic construct
GLQAAGKLR

SEQ ID NO: 50879 - protein, 9 aa, synthetic construct
GLQAAGKVR

SEQ ID NO: 50880 - protein, 9 aa, synthetic construct
GLQAAGKVK

SEQ ID NO: 50881 - protein, 9 aa, synthetic construct
GLQATVHLF

SEQ ID NO: 50882 - protein, 9 aa, synthetic construct
GLQATVHVY

SEQ ID NO: 50883 - protein, 9 aa, synthetic construct
GLQATVHVH

SEQ ID NO: 50884 - protein, 9 aa, synthetic construct
GLQATVHVK

SEQ ID NO: 50885 - protein, 9 aa, synthetic construct
GLQATVHVF

SEQ ID NO: 50886 - protein, 9 aa, synthetic construct
GLQATVRLY

SEQ ID NO: 50887 - protein, 9 aa, synthetic construct
GLQATVRLR

SEQ ID NO: 50888 - protein, 9 aa, synthetic construct
GLQATVRLH

SEQ ID NO: 50889 - protein, 9 aa, synthetic construct
GLQATVRLK

SEQ ID NO: 50890 - protein, 9 aa, synthetic construct
GLQATVRVY

SEQ ID NO: 50891 - protein, 9 aa, synthetic construct
GLQATVRVR

SEQ ID NO: 50892 - protein, 9 aa, synthetic construct
GLQATVRVH

SEQ ID NO: 50893 - protein, 9 aa, synthetic construct
GLQATVRVK

SEQ ID NO: 50894 - protein, 9 aa, synthetic construct
GLQATVRVF

SEQ ID NO: 50895 - protein, 9 aa, synthetic construct
GLQATVKLY

SEQ ID NO: 50896 - protein, 9 aa, synthetic construct
GLQATVKLR

SEQ ID NO: 50897 - protein, 9 aa, synthetic construct
GLQATVKLK

SEQ ID NO: 50898 - protein, 9 aa, synthetic construct
GLQATVKVY

SEQ ID NO: 50899 - protein, 9 aa, synthetic construct
GLQATVKVR

SEQ ID NO: 50900 - protein, 9 aa, synthetic construct
GLQATVKVK

SEQ ID NO: 50901 - protein, 9 aa, synthetic construct
GLQATLHLY

SEQ ID NO: 50902 - protein, 9 aa, synthetic construct
GLQATLHLR

SEQ ID NO: 50903 - protein, 9 aa, synthetic construct
GLQATLHLH

SEQ ID NO: 50904 - protein, 9 aa, synthetic construct
GLQATLHLK

SEQ ID NO: 50905 - protein, 9 aa, synthetic construct
GLQATLHLF

SEQ ID NO: 50906 - protein, 9 aa, synthetic construct
GLQATLHVY

SEQ ID NO: 50907 - protein, 9 aa, synthetic construct
GLQATLHVH

SEQ ID NO: 50908 - protein, 9 aa, synthetic construct
GLQATLHVK

SEQ ID NO: 50909 - protein, 9 aa, synthetic construct
GLQATLHVF

SEQ ID NO: 50910 - protein, 9 aa, synthetic construct
GLQATLRLY

SEQ ID NO: 50911 - protein, 9 aa, synthetic construct
GLQATLRLR

SEQ ID NO: 50912 - protein, 9 aa, synthetic construct
GLQATLRLH

SEQ ID NO: 50913 - protein, 9 aa, synthetic construct
GLQATLRLK

SEQ ID NO: 50914 - protein, 9 aa, synthetic construct
GLQATLRLF

SEQ ID NO: 50915 - protein, 9 aa, synthetic construct
GLQATLRVY

SEQ ID NO: 50916 - protein, 9 aa, synthetic construct
GLQATLRVR

SEQ ID NO: 50917 - protein, 9 aa, synthetic construct
GLQATLRVH

SEQ ID NO: 50918 - protein, 9 aa, synthetic construct
GLQATLRVK

SEQ ID NO: 50919 - protein, 9 aa, synthetic construct
GLQATLRVF

SEQ ID NO: 50920 - protein, 9 aa, synthetic construct
GLQATLKLR

SEQ ID NO: 50921 - protein, 9 aa, synthetic construct
GLQATLKLH

SEQ ID NO: 50922 - protein, 9 aa, synthetic construct
GLQATLKLK

SEQ ID NO: 50923 - protein, 9 aa, synthetic construct
GLQATLKLF

SEQ ID NO: 50924 - protein, 9 aa, synthetic construct
GLQATLKVY

SEQ ID NO: 50925 - protein, 9 aa, synthetic construct
GLQATLKVR

SEQ ID NO: 50926 - protein, 9 aa, synthetic construct
GLQATLKVH

SEQ ID NO: 50927 - protein, 9 aa, synthetic construct
GLQATLKVK

SEQ ID NO: 50928 - protein, 9 aa, synthetic construct
GLQATLKVF

SEQ ID NO: 50929 - protein, 9 aa, synthetic construct
GLQATAHLR

SEQ ID NO: 50930 - protein, 9 aa, synthetic construct
GLQATAHLH

SEQ ID NO: 50931 - protein, 9 aa, synthetic construct
GLQATAHLK

SEQ ID NO: 50932 - protein, 9 aa, synthetic construct
GLQATAHVY

SEQ ID NO: 50933 - protein, 9 aa, synthetic construct
GLQATAHVH

SEQ ID NO: 50934 - protein, 9 aa, synthetic construct
GLQATARLY

SEQ ID NO: 50935 - protein, 9 aa, synthetic construct
GLQATARLR

SEQ ID NO: 50936 - protein, 9 aa, synthetic construct
GLQATARLH

SEQ ID NO: 50937 - protein, 9 aa, synthetic construct
GLQATARLK

SEQ ID NO: 50938 - protein, 9 aa, synthetic construct
GLQATARLF

SEQ ID NO: 50939 - protein, 9 aa, synthetic construct
GLQATARVY

SEQ ID NO: 50940 - protein, 9 aa, synthetic construct
GLQATARVR

SEQ ID NO: 50941 - protein, 9 aa, synthetic construct
GLQATARVH

SEQ ID NO: 50942 - protein, 9 aa, synthetic construct
GLQATARVK

SEQ ID NO: 50943 - protein, 9 aa, synthetic construct
GLQATARVF

SEQ ID NO: 50944 - protein, 9 aa, synthetic construct
GLQATAKLR

SEQ ID NO: 50945 - protein, 9 aa, synthetic construct
GLQATAKLH

SEQ ID NO: 50946 - protein, 9 aa, synthetic construct
GLQATAKLK

SEQ ID NO: 50947 - protein, 9 aa, synthetic construct
GLQATAKVY

SEQ ID NO: 50948 - protein, 9 aa, synthetic construct
GLQATAKVR

SEQ ID NO: 50949 - protein, 9 aa, synthetic construct
GLQATAKVH

SEQ ID NO: 50950 - protein, 9 aa, synthetic construct
GLQATAKVK

SEQ ID NO: 50951 - protein, 9 aa, synthetic construct
GLQATAKVF

SEQ ID NO: 50952 - protein, 9 aa, synthetic construct
GLQATIHLY

SEQ ID NO: 50953 - protein, 9 aa, synthetic construct
GLQATIHLH

SEQ ID NO: 50954 - protein, 9 aa, synthetic construct
GLQATIHLF

SEQ ID NO: 50955 - protein, 9 aa, synthetic construct
GLQATIHVY

SEQ ID NO: 50956 - protein, 9 aa, synthetic construct
GLQATIHVH

SEQ ID NO: 50957 - protein, 9 aa, synthetic construct
GLQATIHVF

SEQ ID NO: 50958 - protein, 9 aa, synthetic construct
GLQATIRLR

SEQ ID NO: 50959 - protein, 9 aa, synthetic construct
GLQATIRLH

SEQ ID NO: 50960 - protein, 9 aa, synthetic construct
GLQATIRLK

SEQ ID NO: 50961 - protein, 9 aa, synthetic construct
GLQATIRLF

SEQ ID NO: 50962 - protein, 9 aa, synthetic construct
GLQATIRVR

SEQ ID NO: 50963 - protein, 9 aa, synthetic construct
GLQATIRVH

SEQ ID NO: 50964 - protein, 9 aa, synthetic construct
GLQATIRVK

SEQ ID NO: 50965 - protein, 9 aa, synthetic construct
GLQATIKLY

SEQ ID NO: 50966 - protein, 9 aa, synthetic construct
GLQATIKLR

SEQ ID NO: 50967 - protein, 9 aa, synthetic construct
GLQATIKLH

SEQ ID NO: 50968 - protein, 9 aa, synthetic construct
GLQATIKLK

SEQ ID NO: 50969 - protein, 9 aa, synthetic construct
GLQATIKLF

SEQ ID NO: 50970 - protein, 9 aa, synthetic construct
GLQATIKVY

SEQ ID NO: 50971 - protein, 9 aa, synthetic construct
GLQATIKVR

SEQ ID NO: 50972 - protein, 9 aa, synthetic construct
GLQATIKVH

SEQ ID NO: 50973 - protein, 9 aa, synthetic construct
GLQATIKVK

SEQ ID NO: 50974 - protein, 9 aa, synthetic construct
GLQATIKVF

SEQ ID NO: 50975 - protein, 9 aa, synthetic construct
GLQATGHLY

SEQ ID NO: 50976 - protein, 9 aa, synthetic construct
GLQATGHLR

SEQ ID NO: 50977 - protein, 9 aa, synthetic construct
GLQATGHLH

SEQ ID NO: 50978 - protein, 9 aa, synthetic construct
GLQATGHLK

SEQ ID NO: 50979 - protein, 9 aa, synthetic construct
GLQATGHVY

SEQ ID NO: 50980 - protein, 9 aa, synthetic construct
GLQATGHVK

SEQ ID NO: 50981 - protein, 9 aa, synthetic construct
GLQATGHVF

SEQ ID NO: 50982 - protein, 9 aa, synthetic construct
GLQATGRLY

SEQ ID NO: 50983 - protein, 9 aa, synthetic construct
GLQATGRLR

SEQ ID NO: 50984 - protein, 9 aa, synthetic construct
GLQATGRLK

SEQ ID NO: 50985 - protein, 9 aa, synthetic construct
GLQATGRVY

SEQ ID NO: 50986 - protein, 9 aa, synthetic construct
GLQATGRVR

SEQ ID NO: 50987 - protein, 9 aa, synthetic construct
GLQATGRVK

SEQ ID NO: 50988 - protein, 9 aa, synthetic construct
GLQATGRVF

SEQ ID NO: 50989 - protein, 9 aa, synthetic construct
GLQATGKLR

SEQ ID NO: 50990 - protein, 9 aa, synthetic construct
GLQATGKLK

SEQ ID NO: 50991 - protein, 9 aa, synthetic construct
GLQATGKVY

SEQ ID NO: 50992 - protein, 9 aa, synthetic construct
GLQATGKVR

SEQ ID NO: 50993 - protein, 9 aa, synthetic construct
GLQATGKVH

SEQ ID NO: 50994 - protein, 9 aa, synthetic construct
GLQATGKVK

SEQ ID NO: 50995 - protein, 9 aa, synthetic construct
GLQATGKVF

SEQ ID NO: 50996 - protein, 9 aa, synthetic construct
GLQASVHLY

SEQ ID NO: 50997 - protein, 9 aa, synthetic construct
GLQASVHLH

SEQ ID NO: 50998 - protein, 9 aa, synthetic construct
GLQASVHLF

SEQ ID NO: 50999 - protein, 9 aa, synthetic construct
GLQASVHVH

SEQ ID NO: 51000 - protein, 9 aa, synthetic construct
GLQASVRLR

SEQ ID NO: 51001 - protein, 9 aa, synthetic construct
GLQASVRLK

SEQ ID NO: 51002 - protein, 9 aa, synthetic construct
GLQASVRLF

SEQ ID NO: 51003 - protein, 9 aa, synthetic construct
GLQASVRVH

SEQ ID NO: 51004 - protein, 9 aa, synthetic construct
GLQASVRVK

SEQ ID NO: 51005 - protein, 9 aa, synthetic construct
GLQASVKLR

SEQ ID NO: 51006 - protein, 9 aa, synthetic construct
GLQASVKLK

SEQ ID NO: 51007 - protein, 9 aa, synthetic construct
GLQASVKVY

SEQ ID NO: 51008 - protein, 9 aa, synthetic construct
GLQASVKVR

SEQ ID NO: 51009 - protein, 9 aa, synthetic construct
GLQASVKVH

SEQ ID NO: 51010 - protein, 9 aa, synthetic construct
GLQASVKVK

SEQ ID NO: 51011 - protein, 9 aa, synthetic construct
GLQASLHLY

SEQ ID NO: 51012 - protein, 9 aa, synthetic construct
GLQASLHLR

SEQ ID NO: 51013 - protein, 9 aa, synthetic construct
GLQASLHVH

SEQ ID NO: 51014 - protein, 9 aa, synthetic construct
GLQASLHVF

SEQ ID NO: 51015 - protein, 9 aa, synthetic construct
GLQASLRLY

SEQ ID NO: 51016 - protein, 9 aa, synthetic construct
GLQASLRLR

SEQ ID NO: 51017 - protein, 9 aa, synthetic construct
GLQASLRLH

SEQ ID NO: 51018 - protein, 9 aa, synthetic construct
GLQASLRLK

SEQ ID NO: 51019 - protein, 9 aa, synthetic construct
GLQASLRVY

SEQ ID NO: 51020 - protein, 9 aa, synthetic construct
GLQASLRVR

SEQ ID NO: 51021 - protein, 9 aa, synthetic construct
GLQASLRVH

SEQ ID NO: 51022 - protein, 9 aa, synthetic construct
GLQASLRVK

SEQ ID NO: 51023 - protein, 9 aa, synthetic construct
GLQASLKLY

SEQ ID NO: 51024 - protein, 9 aa, synthetic construct
GLQASLKLR

SEQ ID NO: 51025 - protein, 9 aa, synthetic construct
GLQASLKLH

SEQ ID NO: 51026 - protein, 9 aa, synthetic construct
GLQASLKLK

SEQ ID NO: 51027 - protein, 9 aa, synthetic construct
GLQASLKVR

SEQ ID NO: 51028 - protein, 9 aa, synthetic construct
GLQASARLR

SEQ ID NO: 51029 - protein, 9 aa, synthetic construct
GLQASARLH

SEQ ID NO: 51030 - protein, 9 aa, synthetic construct
GLQASARLK

SEQ ID NO: 51031 - protein, 9 aa, synthetic construct
GLQASARLF

SEQ ID NO: 51032 - protein, 9 aa, synthetic construct
GLQASARVR

SEQ ID NO: 51033 - protein, 9 aa, synthetic construct
GLQASARVK

SEQ ID NO: 51034 - protein, 9 aa, synthetic construct
GLQASAKLY

SEQ ID NO: 51035 - protein, 9 aa, synthetic construct
GLQASAKLR

SEQ ID NO: 51036 - protein, 9 aa, synthetic construct
GLQASAKLK

SEQ ID NO: 51037 - protein, 9 aa, synthetic construct
GLQASAKVR

SEQ ID NO: 51038 - protein, 9 aa, synthetic construct
GLQASAKVK

SEQ ID NO: 51039 - protein, 9 aa, synthetic construct
GLQASIHLR

SEQ ID NO: 51040 - protein, 9 aa, synthetic construct
GLQASIRLH

SEQ ID NO: 51041 - protein, 9 aa, synthetic construct
GLQASIRLK

SEQ ID NO: 51042 - protein, 9 aa, synthetic construct
GLQASIRVY

SEQ ID NO: 51043 - protein, 9 aa, synthetic construct
GLQASIRVK

SEQ ID NO: 51044 - protein, 9 aa, synthetic construct
GLQASIRVF

SEQ ID NO: 51045 - protein, 9 aa, synthetic construct
GLQASIKLR

SEQ ID NO: 51046 - protein, 9 aa, synthetic construct
GLQASIKLK

SEQ ID NO: 51047 - protein, 9 aa, synthetic construct
GLQASIKVK

SEQ ID NO: 51048 - protein, 9 aa, synthetic construct
GLQASIKVF

SEQ ID NO: 51049 - protein, 9 aa, synthetic construct
GLQASGHVY

SEQ ID NO: 51050 - protein, 9 aa, synthetic construct
GLQASGHVF

SEQ ID NO: 51051 - protein, 9 aa, synthetic construct
GLQASGRLK

SEQ ID NO: 51052 - protein, 9 aa, synthetic construct
GLQASGRVY

SEQ ID NO: 51053 - protein, 9 aa, synthetic construct
GLQASGRVR

SEQ ID NO: 51054 - protein, 9 aa, synthetic construct
GLQASGKLR

SEQ ID NO: 51055 - protein, 9 aa, synthetic construct
GLQASGKLK

SEQ ID NO: 51056 - protein, 9 aa, synthetic construct
GLQASGKVR

SEQ ID NO: 51057 - protein, 9 aa, synthetic construct
GLQASGKVH

SEQ ID NO: 51058 - protein, 9 aa, synthetic construct
GLQASGKVK

SEQ ID NO: 51059 - protein, 9 aa, synthetic construct
GLQAVVHLK

SEQ ID NO: 51060 - protein, 9 aa, synthetic construct
GLQAVVHLF

SEQ ID NO: 51061 - protein, 9 aa, synthetic construct
GLQAVVHVY

SEQ ID NO: 51062 - protein, 9 aa, synthetic construct
GLQAVVHVH

SEQ ID NO: 51063 - protein, 9 aa, synthetic construct
GLQAVVRLR

SEQ ID NO: 51064 - protein, 9 aa, synthetic construct
GLQAVVRLH

SEQ ID NO: 51065 - protein, 9 aa, synthetic construct
GLQAVVRLK

SEQ ID NO: 51066 - protein, 9 aa, synthetic construct
GLQAVVRLF

SEQ ID NO: 51067 - protein, 9 aa, synthetic construct
GLQAVVRVY

SEQ ID NO: 51068 - protein, 9 aa, synthetic construct
GLQAVVRVR

SEQ ID NO: 51069 - protein, 9 aa, synthetic construct
GLQAVVRVH

SEQ ID NO: 51070 - protein, 9 aa, synthetic construct
GLQAVVKLR

SEQ ID NO: 51071 - protein, 9 aa, synthetic construct
GLQAVVKLH

SEQ ID NO: 51072 - protein, 9 aa, synthetic construct
GLQAVVKLK

SEQ ID NO: 51073 - protein, 9 aa, synthetic construct
GLQAVVKVR

SEQ ID NO: 51074 - protein, 9 aa, synthetic construct
GLQAVVKVF

SEQ ID NO: 51075 - protein, 9 aa, synthetic construct
GLQAVLHLY

SEQ ID NO: 51076 - protein, 9 aa, synthetic construct
GLQAVLHLR

SEQ ID NO: 51077 - protein, 9 aa, synthetic construct
GLQAVLHLH

SEQ ID NO: 51078 - protein, 9 aa, synthetic construct
GLQAVLHLK

SEQ ID NO: 51079 - protein, 9 aa, synthetic construct
GLQAVLHLF

SEQ ID NO: 51080 - protein, 9 aa, synthetic construct
GLQAVLHVY

SEQ ID NO: 51081 - protein, 9 aa, synthetic construct
GLQAVLHVR

SEQ ID NO: 51082 - protein, 9 aa, synthetic construct
GLQAVLRLY

SEQ ID NO: 51083 - protein, 9 aa, synthetic construct
GLQAVLRLR

SEQ ID NO: 51084 - protein, 9 aa, synthetic construct
GLQAVLRLH

SEQ ID NO: 51085 - protein, 9 aa, synthetic construct
GLQAVLRLK

SEQ ID NO: 51086 - protein, 9 aa, synthetic construct
GLQAVLRLF

SEQ ID NO: 51087 - protein, 9 aa, synthetic construct
GLQAVLRVY

SEQ ID NO: 51088 - protein, 9 aa, synthetic construct
GLQAVLRVR

SEQ ID NO: 51089 - protein, 9 aa, synthetic construct
GLQAVLRVK

SEQ ID NO: 51090 - protein, 9 aa, synthetic construct
GLQAVLRVF

SEQ ID NO: 51091 - protein, 9 aa, synthetic construct
GLQAVLKLH

SEQ ID NO: 51092 - protein, 9 aa, synthetic construct
GLQAVLKLF

SEQ ID NO: 51093 - protein, 9 aa, synthetic construct
GLQAVLKVR

SEQ ID NO: 51094 - protein, 9 aa, synthetic construct
GLQAVLKVK

SEQ ID NO: 51095 - protein, 9 aa, synthetic construct
GLQAVAHLY

SEQ ID NO: 51096 - protein, 9 aa, synthetic construct
GLQAVAHLF

SEQ ID NO: 51097 - protein, 9 aa, synthetic construct
GLQAVAHVY

SEQ ID NO: 51098 - protein, 9 aa, synthetic construct
GLQAVARLY

SEQ ID NO: 51099 - protein, 9 aa, synthetic construct
GLQAVARLR

SEQ ID NO: 51100 - protein, 9 aa, synthetic construct
GLQAVARLH

SEQ ID NO: 51101 - protein, 9 aa, synthetic construct
GLQAVARLK

SEQ ID NO: 51102 - protein, 9 aa, synthetic construct
GLQAVARVH

SEQ ID NO: 51103 - protein, 9 aa, synthetic construct
GLQAVARVK

SEQ ID NO: 51104 - protein, 9 aa, synthetic construct
GLQAVARVF

SEQ ID NO: 51105 - protein, 9 aa, synthetic construct
GLQAVAKLK

SEQ ID NO: 51106 - protein, 9 aa, synthetic construct
GLQAVAKVY

SEQ ID NO: 51107 - protein, 9 aa, synthetic construct
GLQAVAKVR

SEQ ID NO: 51108 - protein, 9 aa, synthetic construct
GLQAVAKVK

SEQ ID NO: 51109 - protein, 9 aa, synthetic construct
GLQAVIHLF

SEQ ID NO: 51110 - protein, 9 aa, synthetic construct
GLQAVIHVR

SEQ ID NO: 51111 - protein, 9 aa, synthetic construct
GLQAVIHVF

SEQ ID NO: 51112 - protein, 9 aa, synthetic construct
GLQAVIRLY

SEQ ID NO: 51113 - protein, 9 aa, synthetic construct
GLQAVIRLR

SEQ ID NO: 51114 - protein, 9 aa, synthetic construct
GLQAVIRVY

SEQ ID NO: 51115 - protein, 9 aa, synthetic construct
GLQAVIRVH

SEQ ID NO: 51116 - protein, 9 aa, synthetic construct
GLQAVIKLY

SEQ ID NO: 51117 - protein, 9 aa, synthetic construct
GLQAVIKLR

SEQ ID NO: 51118 - protein, 9 aa, synthetic construct
GLQAVIKLK

SEQ ID NO: 51119 - protein, 9 aa, synthetic construct
GLQAVIKLF

SEQ ID NO: 51120 - protein, 9 aa, synthetic construct
GLQAVIKVY

SEQ ID NO: 51121 - protein, 9 aa, synthetic construct
GLQAVIKVR

SEQ ID NO: 51122 - protein, 9 aa, synthetic construct
GLQAVIKVK

SEQ ID NO: 51123 - protein, 9 aa, synthetic construct
GLQAVIKVF

SEQ ID NO: 51124 - protein, 9 aa, synthetic construct
GLQAVGHLY

SEQ ID NO: 51125 - protein, 9 aa, synthetic construct
GLQAVGHLF

SEQ ID NO: 51126 - protein, 9 aa, synthetic construct
GLQAVGHVY

SEQ ID NO: 51127 - protein, 9 aa, synthetic construct
GLQAVGHVR

SEQ ID NO: 51128 - protein, 9 aa, synthetic construct
GLQAVGHVF

SEQ ID NO: 51129 - protein, 9 aa, synthetic construct
GLQAVGRLR

SEQ ID NO: 51130 - protein, 9 aa, synthetic construct
GLQAVGRLK

SEQ ID NO: 51131 - protein, 9 aa, synthetic construct
GLQAGVHLR

SEQ ID NO: 51132 - protein, 9 aa, synthetic construct
GLQAGVHLH

SEQ ID NO: 51133 - protein, 9 aa, synthetic construct
GLQAGVHLF

SEQ ID NO: 51134 - protein, 9 aa, synthetic construct
GLQAGVHVH

SEQ ID NO: 51135 - protein, 9 aa, synthetic construct
GLQAGVRLH

SEQ ID NO: 51136 - protein, 9 aa, synthetic construct
GLQAGVKLK

SEQ ID NO: 51137 - protein, 9 aa, synthetic construct
GLQAGVKVR

SEQ ID NO: 51138 - protein, 9 aa, synthetic construct
GLQAGLHLY

SEQ ID NO: 51139 - protein, 9 aa, synthetic construct
GLQAGLHLR

SEQ ID NO: 51140 - protein, 9 aa, synthetic construct
GLQAGLHLH

SEQ ID NO: 51141 - protein, 9 aa, synthetic construct
GLQAGLHLK

SEQ ID NO: 51142 - protein, 9 aa, synthetic construct
GLQAGLHLF

SEQ ID NO: 51143 - protein, 9 aa, synthetic construct
GLQAGLHVH

SEQ ID NO: 51144 - protein, 9 aa, synthetic construct
GLQAGLHVK

SEQ ID NO: 51145 - protein, 9 aa, synthetic construct
GLQAGLHVF

SEQ ID NO: 51146 - protein, 9 aa, synthetic construct
GLQAGLRLY

SEQ ID NO: 51147 - protein, 9 aa, synthetic construct
GLQAGLRLR

SEQ ID NO: 51148 - protein, 9 aa, synthetic construct
GLQAGLRLH

SEQ ID NO: 51149 - protein, 9 aa, synthetic construct
GLQAGLRLK

SEQ ID NO: 51150 - protein, 9 aa, synthetic construct
GLQAGLRVY

SEQ ID NO: 51151 - protein, 9 aa, synthetic construct
GLQAGLRVR

SEQ ID NO: 51152 - protein, 9 aa, synthetic construct
GLQAGLRVH

SEQ ID NO: 51153 - protein, 9 aa, synthetic construct
GLQAGLRVK

SEQ ID NO: 51154 - protein, 9 aa, synthetic construct
GLQAGLRVF

SEQ ID NO: 51155 - protein, 9 aa, synthetic construct
GLQAGLKLR

SEQ ID NO: 51156 - protein, 9 aa, synthetic construct
GLQAGLKLK

SEQ ID NO: 51157 - protein, 9 aa, synthetic construct
GLQAGLKVR

SEQ ID NO: 51158 - protein, 9 aa, synthetic construct
GLQAGLKVK

SEQ ID NO: 51159 - protein, 9 aa, synthetic construct
GLQAGAHLR

SEQ ID NO: 51160 - protein, 9 aa, synthetic construct
GLQAGARLR

SEQ ID NO: 51161 - protein, 9 aa, synthetic construct
GLQAGARLK

SEQ ID NO: 51162 - protein, 9 aa, synthetic construct
GLQAGARVR

SEQ ID NO: 51163 - protein, 9 aa, synthetic construct
GLQAGARVK

SEQ ID NO: 51164 - protein, 9 aa, synthetic construct
GLQAGAKLK

SEQ ID NO: 51165 - protein, 9 aa, synthetic construct
GLQAGAKVR

SEQ ID NO: 51166 - protein, 9 aa, synthetic construct
GLQAGAKVK

SEQ ID NO: 51167 - protein, 9 aa, synthetic construct
GLQAGIHLH

SEQ ID NO: 51168 - protein, 9 aa, synthetic construct
GLQAGIHVF

SEQ ID NO: 51169 - protein, 9 aa, synthetic construct
GLQAGIRLR

SEQ ID NO: 51170 - protein, 9 aa, synthetic construct
GLQAGIRLK

SEQ ID NO: 51171 - protein, 9 aa, synthetic construct
GLQAGIRVR

SEQ ID NO: 51172 - protein, 9 aa, synthetic construct
GLQAGIRVH

SEQ ID NO: 51173 - protein, 9 aa, synthetic construct
GLQAGIRVK

SEQ ID NO: 51174 - protein, 9 aa, synthetic construct
GLQAGIRVF

SEQ ID NO: 51175 - protein, 9 aa, synthetic construct
GLQAGIKLR

SEQ ID NO: 51176 - protein, 9 aa, synthetic construct
GLQAGIKLK

SEQ ID NO: 51177 - protein, 9 aa, synthetic construct
GLQAGGHVY

SEQ ID NO: 51178 - protein, 9 aa, synthetic construct
GLQAGGRLR

SEQ ID NO: 51179 - protein, 9 aa, synthetic construct
GLQAGGRLH

SEQ ID NO: 51180 - protein, 9 aa, synthetic construct
GLQAGGRLK

SEQ ID NO: 51181 - protein, 9 aa, synthetic construct
GLQAGGRVY

SEQ ID NO: 51182 - protein, 9 aa, synthetic construct
GLQAGGRVR

SEQ ID NO: 51183 - protein, 9 aa, synthetic construct
GLQAGGRVH

SEQ ID NO: 51184 - protein, 9 aa, synthetic construct
GLQAGGKLR

SEQ ID NO: 51185 - protein, 9 aa, synthetic construct
GLQAGGKLK

SEQ ID NO: 51186 - protein, 9 aa, synthetic construct
GLPGAVHLF

SEQ ID NO: 51187 - protein, 9 aa, synthetic construct
GLPGAVRLR

SEQ ID NO: 51188 - protein, 9 aa, synthetic construct
GLPGAVRLK

SEQ ID NO: 51189 - protein, 9 aa, synthetic construct
GLPGAVRLF

SEQ ID NO: 51190 - protein, 9 aa, synthetic construct
GLPGAVRVR

SEQ ID NO: 51191 - protein, 9 aa, synthetic construct
GLPGAVRVK

SEQ ID NO: 51192 - protein, 9 aa, synthetic construct
GLPGAVKLK

SEQ ID NO: 51193 - protein, 9 aa, synthetic construct
GLPGALHLY

SEQ ID NO: 51194 - protein, 9 aa, synthetic construct
GLPGALHLF

SEQ ID NO: 51195 - protein, 9 aa, synthetic construct
GLPGALRLR

SEQ ID NO: 51196 - protein, 9 aa, synthetic construct
GLPGALRLH

SEQ ID NO: 51197 - protein, 9 aa, synthetic construct
GLPGALRLK

SEQ ID NO: 51198 - protein, 9 aa, synthetic construct
GLPGALRLF

SEQ ID NO: 51199 - protein, 9 aa, synthetic construct
GLPGALRVY

SEQ ID NO: 51200 - protein, 9 aa, synthetic construct
GLPGALRVR

SEQ ID NO: 51201 - protein, 9 aa, synthetic construct
GLPGALRVH

SEQ ID NO: 51202 - protein, 9 aa, synthetic construct
GLPGALKLK

SEQ ID NO: 51203 - protein, 9 aa, synthetic construct
GLPGALKVK

SEQ ID NO: 51204 - protein, 9 aa, synthetic construct
GLPGAARVK

SEQ ID NO: 51205 - protein, 9 aa, synthetic construct
GLPGAAKLR

SEQ ID NO: 51206 - protein, 9 aa, synthetic construct
GLPGAAKLK

SEQ ID NO: 51207 - protein, 9 aa, synthetic construct
GLPGAAKVR

SEQ ID NO: 51208 - protein, 9 aa, synthetic construct
GLPGAAKVK

SEQ ID NO: 51209 - protein, 9 aa, synthetic construct
GLPGAIHLY

SEQ ID NO: 51210 - protein, 9 aa, synthetic construct
GLPGAIRLR

SEQ ID NO: 51211 - protein, 9 aa, synthetic construct
GLPGAIRLK

SEQ ID NO: 51212 - protein, 9 aa, synthetic construct
GLPGAIRLF

SEQ ID NO: 51213 - protein, 9 aa, synthetic construct
GLPGAIRVY

SEQ ID NO: 51214 - protein, 9 aa, synthetic construct
GLPGAIRVR

SEQ ID NO: 51215 - protein, 9 aa, synthetic construct
GLPGAIRVK

SEQ ID NO: 51216 - protein, 9 aa, synthetic construct
GLPGAIKLY

SEQ ID NO: 51217 - protein, 9 aa, synthetic construct
GLPGAIKLR

SEQ ID NO: 51218 - protein, 9 aa, synthetic construct
GLPGAIKVK

SEQ ID NO: 51219 - protein, 9 aa, synthetic construct
GLPGAGRLR

SEQ ID NO: 51220 - protein, 9 aa, synthetic construct
GLPGAGRLK

SEQ ID NO: 51221 - protein, 9 aa, synthetic construct
GLPGAGKLK

SEQ ID NO: 51222 - protein, 9 aa, synthetic construct
GLPGAGKVR

SEQ ID NO: 51223 - protein, 9 aa, synthetic construct
GLPGAGKVK

SEQ ID NO: 51224 - protein, 9 aa, synthetic construct
GLPGTVRLR

SEQ ID NO: 51225 - protein, 9 aa, synthetic construct
GLPGTVRVR

SEQ ID NO: 51226 - protein, 9 aa, synthetic construct
GLPGTVKLR

SEQ ID NO: 51227 - protein, 9 aa, synthetic construct
GLPGTVKVR

SEQ ID NO: 51228 - protein, 9 aa, synthetic construct
GLPGTLHLY

SEQ ID NO: 51229 - protein, 9 aa, synthetic construct
GLPGTLHLH

SEQ ID NO: 51230 - protein, 9 aa, synthetic construct
GLPGTLHLF

SEQ ID NO: 51231 - protein, 9 aa, synthetic construct
GLPGTLRLY

SEQ ID NO: 51232 - protein, 9 aa, synthetic construct
GLPGTLRLR

SEQ ID NO: 51233 - protein, 9 aa, synthetic construct
GLPGTLRLK

SEQ ID NO: 51234 - protein, 9 aa, synthetic construct
GLPGTLRVY

SEQ ID NO: 51235 - protein, 9 aa, synthetic construct
GLPGTLRVR

SEQ ID NO: 51236 - protein, 9 aa, synthetic construct
GLPGTLRVH

SEQ ID NO: 51237 - protein, 9 aa, synthetic construct
GLPGTLRVK

SEQ ID NO: 51238 - protein, 9 aa, synthetic construct
GLPGTLKLK

SEQ ID NO: 51239 - protein, 9 aa, synthetic construct
GLPGTLKVY

SEQ ID NO: 51240 - protein, 9 aa, synthetic construct
GLPGTLKVR

SEQ ID NO: 51241 - protein, 9 aa, synthetic construct
GLPGTLKVK

SEQ ID NO: 51242 - protein, 9 aa, synthetic construct
GLPGTARLR

SEQ ID NO: 51243 - protein, 9 aa, synthetic construct
GLPGTARVR

SEQ ID NO: 51244 - protein, 9 aa, synthetic construct
GLPGTARVK

SEQ ID NO: 51245 - protein, 9 aa, synthetic construct
GLPGTAKVR

SEQ ID NO: 51246 - protein, 9 aa, synthetic construct
GLPGTIRVY

SEQ ID NO: 51247 - protein, 9 aa, synthetic construct
GLPGTIRVR

SEQ ID NO: 51248 - protein, 9 aa, synthetic construct
GLPGTIRVK

SEQ ID NO: 51249 - protein, 9 aa, synthetic construct
GLPGTIRVF

SEQ ID NO: 51250 - protein, 9 aa, synthetic construct
GLPGTIKLR

SEQ ID NO: 51251 - protein, 9 aa, synthetic construct
GLPGTIKLK

SEQ ID NO: 51252 - protein, 9 aa, synthetic construct
GLPGTIKVR

SEQ ID NO: 51253 - protein, 9 aa, synthetic construct
GLPGTIKVK

SEQ ID NO: 51254 - protein, 9 aa, synthetic construct
GLPGTGRLR

SEQ ID NO: 51255 - protein, 9 aa, synthetic construct
GLPGTGRLH

SEQ ID NO: 51256 - protein, 9 aa, synthetic construct
GLPGTGRVR

SEQ ID NO: 51257 - protein, 9 aa, synthetic construct
GLPGTGRVK

SEQ ID NO: 51258 - protein, 9 aa, synthetic construct
GLPGTGKLR

SEQ ID NO: 51259 - protein, 9 aa, synthetic construct
GLPGSVHLF

SEQ ID NO: 51260 - protein, 9 aa, synthetic construct
GLPGSVHVH

SEQ ID NO: 51261 - protein, 9 aa, synthetic construct
GLPGSVHVF

SEQ ID NO: 51262 - protein, 9 aa, synthetic construct
GLPGSVRLR

SEQ ID NO: 51263 - protein, 9 aa, synthetic construct
GLPGSVRLK

SEQ ID NO: 51264 - protein, 9 aa, synthetic construct
GLPGSVRLF

SEQ ID NO: 51265 - protein, 9 aa, synthetic construct
GLPGSVRVR

SEQ ID NO: 51266 - protein, 9 aa, synthetic construct
GLPGSVRVH

SEQ ID NO: 51267 - protein, 9 aa, synthetic construct
GLPGSVRVK

SEQ ID NO: 51268 - protein, 9 aa, synthetic construct
GLPGSVKLR

SEQ ID NO: 51269 - protein, 9 aa, synthetic construct
GLPGSVKLK

SEQ ID NO: 51270 - protein, 9 aa, synthetic construct
GLPGSVKVR

SEQ ID NO: 51271 - protein, 9 aa, synthetic construct
GLPGSVKVK

SEQ ID NO: 51272 - protein, 9 aa, synthetic construct
GLPGSLHLY

SEQ ID NO: 51273 - protein, 9 aa, synthetic construct
GLPGSLHLF

SEQ ID NO: 51274 - protein, 9 aa, synthetic construct
GLPGSLRLY

SEQ ID NO: 51275 - protein, 9 aa, synthetic construct
GLPGSLRLR

SEQ ID NO: 51276 - protein, 9 aa, synthetic construct
GLPGSLRLH

SEQ ID NO: 51277 - protein, 9 aa, synthetic construct
GLPGSLRLK

SEQ ID NO: 51278 - protein, 9 aa, synthetic construct
GLPGSLRVR

SEQ ID NO: 51279 - protein, 9 aa, synthetic construct
GLPGSLRVK

SEQ ID NO: 51280 - protein, 9 aa, synthetic construct
GLPGSLKLR

SEQ ID NO: 51281 - protein, 9 aa, synthetic construct
GLPGSLKLK

SEQ ID NO: 51282 - protein, 9 aa, synthetic construct
GLPGSLKLF

SEQ ID NO: 51283 - protein, 9 aa, synthetic construct
GLPGSLKVR

SEQ ID NO: 51284 - protein, 9 aa, synthetic construct
GLPGSLKVK

SEQ ID NO: 51285 - protein, 9 aa, synthetic construct
GLPGSARLR

SEQ ID NO: 51286 - protein, 9 aa, synthetic construct
GLPGSARLK

SEQ ID NO: 51287 - protein, 9 aa, synthetic construct
GLPGSARVR

SEQ ID NO: 51288 - protein, 9 aa, synthetic construct
GLPGSARVK

SEQ ID NO: 51289 - protein, 9 aa, synthetic construct
GLPGSAKLR

SEQ ID NO: 51290 - protein, 9 aa, synthetic construct
GLPGSAKLH

SEQ ID NO: 51291 - protein, 9 aa, synthetic construct
GLPGSAKLK

SEQ ID NO: 51292 - protein, 9 aa, synthetic construct
GLPGSAKVR

SEQ ID NO: 51293 - protein, 9 aa, synthetic construct
GLPGSAKVK

SEQ ID NO: 51294 - protein, 9 aa, synthetic construct
GLPGSIRLY

SEQ ID NO: 51295 - protein, 9 aa, synthetic construct
GLPGSIRLR

SEQ ID NO: 51296 - protein, 9 aa, synthetic construct
GLPGSIRLK

SEQ ID NO: 51297 - protein, 9 aa, synthetic construct
GLPGSIRLF

SEQ ID NO: 51298 - protein, 9 aa, synthetic construct
GLPGSIRVY

SEQ ID NO: 51299 - protein, 9 aa, synthetic construct
GLPGSIKLY

SEQ ID NO: 51300 - protein, 9 aa, synthetic construct
GLPGSIKLR

SEQ ID NO: 51301 - protein, 9 aa, synthetic construct
GLPGSIKVR

SEQ ID NO: 51302 - protein, 9 aa, synthetic construct
GLPGSIKVH

SEQ ID NO: 51303 - protein, 9 aa, synthetic construct
GLPGSIKVK

SEQ ID NO: 51304 - protein, 9 aa, synthetic construct
GLPGSIKVF

SEQ ID NO: 51305 - protein, 9 aa, synthetic construct
GLPGSGHLK

SEQ ID NO: 51306 - protein, 9 aa, synthetic construct
GLPGSGRLR

SEQ ID NO: 51307 - protein, 9 aa, synthetic construct
GLPGSGRLK

SEQ ID NO: 51308 - protein, 9 aa, synthetic construct
GLPGSGRVR

SEQ ID NO: 51309 - protein, 9 aa, synthetic construct
GLPGSGRVK

SEQ ID NO: 51310 - protein, 9 aa, synthetic construct
GLPGSGKLK

SEQ ID NO: 51311 - protein, 9 aa, synthetic construct
GLPGSGKVR

SEQ ID NO: 51312 - protein, 9 aa, synthetic construct
GLPGSGKVK

SEQ ID NO: 51313 - protein, 9 aa, synthetic construct
GLPGVVHLK

SEQ ID NO: 51314 - protein, 9 aa, synthetic construct
GLPGVVHLF

SEQ ID NO: 51315 - protein, 9 aa, synthetic construct
GLPGVVRLH

SEQ ID NO: 51316 - protein, 9 aa, synthetic construct
GLPGVVRLK

SEQ ID NO: 51317 - protein, 9 aa, synthetic construct
GLPGVVRVR

SEQ ID NO: 51318 - protein, 9 aa, synthetic construct
GLPGVVRVK

SEQ ID NO: 51319 - protein, 9 aa, synthetic construct
GLPGVVKLR

SEQ ID NO: 51320 - protein, 9 aa, synthetic construct
GLPGVVKLK

SEQ ID NO: 51321 - protein, 9 aa, synthetic construct
GLPGVVKLF

SEQ ID NO: 51322 - protein, 9 aa, synthetic construct
GLPGVVKVR

SEQ ID NO: 51323 - protein, 9 aa, synthetic construct
GLPGVVKVK

SEQ ID NO: 51324 - protein, 9 aa, synthetic construct
GLPGVLHLY

SEQ ID NO: 51325 - protein, 9 aa, synthetic construct
GLPGVLHLR

SEQ ID NO: 51326 - protein, 9 aa, synthetic construct
GLPGVLHLF

SEQ ID NO: 51327 - protein, 9 aa, synthetic construct
GLPGVLHVR

SEQ ID NO: 51328 - protein, 9 aa, synthetic construct
GLPGVLRLR

SEQ ID NO: 51329 - protein, 9 aa, synthetic construct
GLPGVLRLH

SEQ ID NO: 51330 - protein, 9 aa, synthetic construct
GLPGVLRLK

SEQ ID NO: 51331 - protein, 9 aa, synthetic construct
GLPGVLRLF

SEQ ID NO: 51332 - protein, 9 aa, synthetic construct
GLPGVLRVY

SEQ ID NO: 51333 - protein, 9 aa, synthetic construct
GLPGVLRVR

SEQ ID NO: 51334 - protein, 9 aa, synthetic construct
GLPGVLRVH

SEQ ID NO: 51335 - protein, 9 aa, synthetic construct
GLPGVLRVK

SEQ ID NO: 51336 - protein, 9 aa, synthetic construct
GLPGVLRVF

SEQ ID NO: 51337 - protein, 9 aa, synthetic construct
GLPGVLKLY

SEQ ID NO: 51338 - protein, 9 aa, synthetic construct
GLPGVLKLK

SEQ ID NO: 51339 - protein, 9 aa, synthetic construct
GLPGVLKLF

SEQ ID NO: 51340 - protein, 9 aa, synthetic construct
GLPGVLKVR

SEQ ID NO: 51341 - protein, 9 aa, synthetic construct
GLPGVLKVH

SEQ ID NO: 51342 - protein, 9 aa, synthetic construct
GLPGVLKVK

SEQ ID NO: 51343 - protein, 9 aa, synthetic construct
GLPGVLKVF

SEQ ID NO: 51344 - protein, 9 aa, synthetic construct
GLPGVARLR

SEQ ID NO: 51345 - protein, 9 aa, synthetic construct
GLPGVARLK

SEQ ID NO: 51346 - protein, 9 aa, synthetic construct
GLPGVARVR

SEQ ID NO: 51347 - protein, 9 aa, synthetic construct
GLPGVARVK

SEQ ID NO: 51348 - protein, 9 aa, synthetic construct
GLPGVAKLR

SEQ ID NO: 51349 - protein, 9 aa, synthetic construct
GLPGVAKLK

SEQ ID NO: 51350 - protein, 9 aa, synthetic construct
GLPGVAKLF

SEQ ID NO: 51351 - protein, 9 aa, synthetic construct
GLPGVAKVY

SEQ ID NO: 51352 - protein, 9 aa, synthetic construct
GLPGVAKVR

SEQ ID NO: 51353 - protein, 9 aa, synthetic construct
GLPGVAKVK

SEQ ID NO: 51354 - protein, 9 aa, synthetic construct
GLPGVIHLY

SEQ ID NO: 51355 - protein, 9 aa, synthetic construct
GLPGVIHLF

SEQ ID NO: 51356 - protein, 9 aa, synthetic construct
GLPGVIRLY

SEQ ID NO: 51357 - protein, 9 aa, synthetic construct
GLPGVIRLK

SEQ ID NO: 51358 - protein, 9 aa, synthetic construct
GLPGVIRLF

SEQ ID NO: 51359 - protein, 9 aa, synthetic construct
GLPGVIRVY

SEQ ID NO: 51360 - protein, 9 aa, synthetic construct
GLPGVIRVR

SEQ ID NO: 51361 - protein, 9 aa, synthetic construct
GLPGVIRVH

SEQ ID NO: 51362 - protein, 9 aa, synthetic construct
GLPGVIRVF

SEQ ID NO: 51363 - protein, 9 aa, synthetic construct
GLPGVIKLR

SEQ ID NO: 51364 - protein, 9 aa, synthetic construct
GLPGVIKVR

SEQ ID NO: 51365 - protein, 9 aa, synthetic construct
GLPGVGRLY

SEQ ID NO: 51366 - protein, 9 aa, synthetic construct
GLPGVGRLR

SEQ ID NO: 51367 - protein, 9 aa, synthetic construct
GLPGVGRLH

SEQ ID NO: 51368 - protein, 9 aa, synthetic construct
GLPGVGRLK

SEQ ID NO: 51369 - protein, 9 aa, synthetic construct
GLPGVGRLF

SEQ ID NO: 51370 - protein, 9 aa, synthetic construct
GLPGVGRVR

SEQ ID NO: 51371 - protein, 9 aa, synthetic construct
GLPGVGRVK

SEQ ID NO: 51372 - protein, 9 aa, synthetic construct
GLPGVGKLH

SEQ ID NO: 51373 - protein, 9 aa, synthetic construct
GLPGVGKLK

SEQ ID NO: 51374 - protein, 9 aa, synthetic construct
GLPGVGKVR

SEQ ID NO: 51375 - protein, 9 aa, synthetic construct
GLPGVGKVK

SEQ ID NO: 51376 - protein, 9 aa, synthetic construct
GLPGGVHVH

SEQ ID NO: 51377 - protein, 9 aa, synthetic construct
GLPGGVRLR

SEQ ID NO: 51378 - protein, 9 aa, synthetic construct
GLPGGVRLK

SEQ ID NO: 51379 - protein, 9 aa, synthetic construct
GLPGGVRVR

SEQ ID NO: 51380 - protein, 9 aa, synthetic construct
GLPGGVKLK

SEQ ID NO: 51381 - protein, 9 aa, synthetic construct
GLPGGVKVK

SEQ ID NO: 51382 - protein, 9 aa, synthetic construct
GLPGGLHLY

SEQ ID NO: 51383 - protein, 9 aa, synthetic construct
GLPGGLHLR

SEQ ID NO: 51384 - protein, 9 aa, synthetic construct
GLPGGLHLK

SEQ ID NO: 51385 - protein, 9 aa, synthetic construct
GLPGGLHVF

SEQ ID NO: 51386 - protein, 9 aa, synthetic construct
GLPGGLRLR

SEQ ID NO: 51387 - protein, 9 aa, synthetic construct
GLPGGLRLH

SEQ ID NO: 51388 - protein, 9 aa, synthetic construct
GLPGGLRLK

SEQ ID NO: 51389 - protein, 9 aa, synthetic construct
GLPGGLRLF

SEQ ID NO: 51390 - protein, 9 aa, synthetic construct
GLPGGLRVY

SEQ ID NO: 51391 - protein, 9 aa, synthetic construct
GLPGGLRVH

SEQ ID NO: 51392 - protein, 9 aa, synthetic construct
GLPGGLRVK

SEQ ID NO: 51393 - protein, 9 aa, synthetic construct
GLPGGLRVF

SEQ ID NO: 51394 - protein, 9 aa, synthetic construct
GLPGGLKLR

SEQ ID NO: 51395 - protein, 9 aa, synthetic construct
GLPGGLKLK

SEQ ID NO: 51396 - protein, 9 aa, synthetic construct
GLPGGLKLF

SEQ ID NO: 51397 - protein, 9 aa, synthetic construct
GLPGGLKVR

SEQ ID NO: 51398 - protein, 9 aa, synthetic construct
GLPGGLKVK

SEQ ID NO: 51399 - protein, 9 aa, synthetic construct
GLPGGARLY

SEQ ID NO: 51400 - protein, 9 aa, synthetic construct
GLPGGARLR

SEQ ID NO: 51401 - protein, 9 aa, synthetic construct
GLPGGARLK

SEQ ID NO: 51402 - protein, 9 aa, synthetic construct
GLPGGARVK

SEQ ID NO: 51403 - protein, 9 aa, synthetic construct
GLPGGAKLK

SEQ ID NO: 51404 - protein, 9 aa, synthetic construct
GLPGGAKVR

SEQ ID NO: 51405 - protein, 9 aa, synthetic construct
GLPGGAKVK

SEQ ID NO: 51406 - protein, 9 aa, synthetic construct
GLPGGIRLF

SEQ ID NO: 51407 - protein, 9 aa, synthetic construct
GLPGGIRVH

SEQ ID NO: 51408 - protein, 9 aa, synthetic construct
GLPGGIRVK

SEQ ID NO: 51409 - protein, 9 aa, synthetic construct
GLPGGIKVK

SEQ ID NO: 51410 - protein, 9 aa, synthetic construct
GLPGGGHLR

SEQ ID NO: 51411 - protein, 9 aa, synthetic construct
GLPGGGHLK

SEQ ID NO: 51412 - protein, 9 aa, synthetic construct
GLPGGGHVR

SEQ ID NO: 51413 - protein, 9 aa, synthetic construct
GLPGGGHVH

SEQ ID NO: 51414 - protein, 9 aa, synthetic construct
GLPGGGRLR

SEQ ID NO: 51415 - protein, 9 aa, synthetic construct
GLPGGGRLH

SEQ ID NO: 51416 - protein, 9 aa, synthetic construct
GLPGGGRLK

SEQ ID NO: 51417 - protein, 9 aa, synthetic construct
GLPGGGRVR

SEQ ID NO: 51418 - protein, 9 aa, synthetic construct
GLPGGGRVK

SEQ ID NO: 51419 - protein, 9 aa, synthetic construct
GLPGGGKLR

SEQ ID NO: 51420 - protein, 9 aa, synthetic construct
GLPGGGKLK

SEQ ID NO: 51421 - protein, 9 aa, synthetic construct
GLPGGGKVR

SEQ ID NO: 51422 - protein, 9 aa, synthetic construct
GLPAAVHLY

SEQ ID NO: 51423 - protein, 9 aa, synthetic construct
GLPAAVHLF

SEQ ID NO: 51424 - protein, 9 aa, synthetic construct
GLPAAVRLR

SEQ ID NO: 51425 - protein, 9 aa, synthetic construct
GLPAAVRLK

SEQ ID NO: 51426 - protein, 9 aa, synthetic construct
GLPAAVRVK

SEQ ID NO: 51427 - protein, 9 aa, synthetic construct
GLPAALHLR

SEQ ID NO: 51428 - protein, 9 aa, synthetic construct
GLPAALHLK

SEQ ID NO: 51429 - protein, 9 aa, synthetic construct
GLPAALHVR

SEQ ID NO: 51430 - protein, 9 aa, synthetic construct
GLPAALHVF

SEQ ID NO: 51431 - protein, 9 aa, synthetic construct
GLPAALRLY

SEQ ID NO: 51432 - protein, 9 aa, synthetic construct
GLPAALRLR

SEQ ID NO: 51433 - protein, 9 aa, synthetic construct
GLPAALRLK

SEQ ID NO: 51434 - protein, 9 aa, synthetic construct
GLPAALRLF

SEQ ID NO: 51435 - protein, 9 aa, synthetic construct
GLPAALRVR

SEQ ID NO: 51436 - protein, 9 aa, synthetic construct
GLPAALRVK

SEQ ID NO: 51437 - protein, 9 aa, synthetic construct
GLPAALKLY

SEQ ID NO: 51438 - protein, 9 aa, synthetic construct
GLPAALKLR

SEQ ID NO: 51439 - protein, 9 aa, synthetic construct
GLPAALKLK

SEQ ID NO: 51440 - protein, 9 aa, synthetic construct
GLPAALKLF

SEQ ID NO: 51441 - protein, 9 aa, synthetic construct
GLPAALKVK

SEQ ID NO: 51442 - protein, 9 aa, synthetic construct
GLPAAARVK

SEQ ID NO: 51443 - protein, 9 aa, synthetic construct
GLPAAAKLR

SEQ ID NO: 51444 - protein, 9 aa, synthetic construct
GLPAAAKLK

SEQ ID NO: 51445 - protein, 9 aa, synthetic construct
GLPAAAKVR

SEQ ID NO: 51446 - protein, 9 aa, synthetic construct
GLPAAIRLR

SEQ ID NO: 51447 - protein, 9 aa, synthetic construct
GLPAAIKLR

SEQ ID NO: 51448 - protein, 9 aa, synthetic construct
GLPAAGRLR

SEQ ID NO: 51449 - protein, 9 aa, synthetic construct
GLPAAGRLK

SEQ ID NO: 51450 - protein, 9 aa, synthetic construct
GLPAAGKLR

SEQ ID NO: 51451 - protein, 9 aa, synthetic construct
GLPAAGKLK

SEQ ID NO: 51452 - protein, 9 aa, synthetic construct
GLPAAGKVR

SEQ ID NO: 51453 - protein, 9 aa, synthetic construct
GLPAAGKVK

SEQ ID NO: 51454 - protein, 9 aa, synthetic construct
GLPATVRVR

SEQ ID NO: 51455 - protein, 9 aa, synthetic construct
GLPATVRVK

SEQ ID NO: 51456 - protein, 9 aa, synthetic construct
GLPATVKLK

SEQ ID NO: 51457 - protein, 9 aa, synthetic construct
GLPATVKVR

SEQ ID NO: 51458 - protein, 9 aa, synthetic construct
GLPATVKVK

SEQ ID NO: 51459 - protein, 9 aa, synthetic construct
GLPATLHVY

SEQ ID NO: 51460 - protein, 9 aa, synthetic construct
GLPATLHVR

SEQ ID NO: 51461 - protein, 9 aa, synthetic construct
GLPATLRLR

SEQ ID NO: 51462 - protein, 9 aa, synthetic construct
GLPATLRLH

SEQ ID NO: 51463 - protein, 9 aa, synthetic construct
GLPATLRVR

SEQ ID NO: 51464 - protein, 9 aa, synthetic construct
GLPATLRVK

SEQ ID NO: 51465 - protein, 9 aa, synthetic construct
GLPATLKLR

SEQ ID NO: 51466 - protein, 9 aa, synthetic construct
GLPATLKLF

SEQ ID NO: 51467 - protein, 9 aa, synthetic construct
GLPATLKVR

SEQ ID NO: 51468 - protein, 9 aa, synthetic construct
GLPATLKVK

SEQ ID NO: 51469 - protein, 9 aa, synthetic construct
GLPATLKVF

SEQ ID NO: 51470 - protein, 9 aa, synthetic construct
GLPATARLR

SEQ ID NO: 51471 - protein, 9 aa, synthetic construct
GLPATARVK

SEQ ID NO: 51472 - protein, 9 aa, synthetic construct
GLPATAKVR

SEQ ID NO: 51473 - protein, 9 aa, synthetic construct
GLPATIRLR

SEQ ID NO: 51474 - protein, 9 aa, synthetic construct
GLPATIRLK

SEQ ID NO: 51475 - protein, 9 aa, synthetic construct
GLPATIRVR

SEQ ID NO: 51476 - protein, 9 aa, synthetic construct
GLPATIRVK

SEQ ID NO: 51477 - protein, 9 aa, synthetic construct
GLPATIKLR

SEQ ID NO: 51478 - protein, 9 aa, synthetic construct
GLPATIKLK

SEQ ID NO: 51479 - protein, 9 aa, synthetic construct
GLPATGRLR

SEQ ID NO: 51480 - protein, 9 aa, synthetic construct
GLPATGRLK

SEQ ID NO: 51481 - protein, 9 aa, synthetic construct
GLPATGRVK

SEQ ID NO: 51482 - protein, 9 aa, synthetic construct
GLPATGKLR

SEQ ID NO: 51483 - protein, 9 aa, synthetic construct
GLPATGKVR

SEQ ID NO: 51484 - protein, 9 aa, synthetic construct
GLPATGKVK

SEQ ID NO: 51485 - protein, 9 aa, synthetic construct
GLPASVHLH

SEQ ID NO: 51486 - protein, 9 aa, synthetic construct
GLPASVHLF

SEQ ID NO: 51487 - protein, 9 aa, synthetic construct
GLPASVHVH

SEQ ID NO: 51488 - protein, 9 aa, synthetic construct
GLPASVRVK

SEQ ID NO: 51489 - protein, 9 aa, synthetic construct
GLPASVKLK

SEQ ID NO: 51490 - protein, 9 aa, synthetic construct
GLPASVKVR

SEQ ID NO: 51491 - protein, 9 aa, synthetic construct
GLPASLHLR

SEQ ID NO: 51492 - protein, 9 aa, synthetic construct
GLPASLHLF

SEQ ID NO: 51493 - protein, 9 aa, synthetic construct
GLPASLHVH

SEQ ID NO: 51494 - protein, 9 aa, synthetic construct
GLPASLRLR

SEQ ID NO: 51495 - protein, 9 aa, synthetic construct
GLPASLRLK

SEQ ID NO: 51496 - protein, 9 aa, synthetic construct
GLPASLRLF

SEQ ID NO: 51497 - protein, 9 aa, synthetic construct
GLPASLRVR

SEQ ID NO: 51498 - protein, 9 aa, synthetic construct
GLPASLRVH

SEQ ID NO: 51499 - protein, 9 aa, synthetic construct
GLPASLRVK

SEQ ID NO: 51500 - protein, 9 aa, synthetic construct
GLPASLKLY

SEQ ID NO: 51501 - protein, 9 aa, synthetic construct
GLPASLKLR

SEQ ID NO: 51502 - protein, 9 aa, synthetic construct
GLPASLKLK

SEQ ID NO: 51503 - protein, 9 aa, synthetic construct
GLPASLKLF

SEQ ID NO: 51504 - protein, 9 aa, synthetic construct
GLPASLKVR

SEQ ID NO: 51505 - protein, 9 aa, synthetic construct
GLPASLKVH

SEQ ID NO: 51506 - protein, 9 aa, synthetic construct
GLPASLKVK

SEQ ID NO: 51507 - protein, 9 aa, synthetic construct
GLPASARLR

SEQ ID NO: 51508 - protein, 9 aa, synthetic construct
GLPASARVR

SEQ ID NO: 51509 - protein, 9 aa, synthetic construct
GLPASAKLK

SEQ ID NO: 51510 - protein, 9 aa, synthetic construct
GLPASAKVR

SEQ ID NO: 51511 - protein, 9 aa, synthetic construct
GLPASIRLR

SEQ ID NO: 51512 - protein, 9 aa, synthetic construct
GLPASIRLK

SEQ ID NO: 51513 - protein, 9 aa, synthetic construct
GLPASIRLF

SEQ ID NO: 51514 - protein, 9 aa, synthetic construct
GLPASIRVR

SEQ ID NO: 51515 - protein, 9 aa, synthetic construct
GLPASIRVH

SEQ ID NO: 51516 - protein, 9 aa, synthetic construct
GLPASIKLR

SEQ ID NO: 51517 - protein, 9 aa, synthetic construct
GLPASIKVY

SEQ ID NO: 51518 - protein, 9 aa, synthetic construct
GLPASIKVR

SEQ ID NO: 51519 - protein, 9 aa, synthetic construct
GLPASIKVK

SEQ ID NO: 51520 - protein, 9 aa, synthetic construct
GLPASGRLR

SEQ ID NO: 51521 - protein, 9 aa, synthetic construct
GLPASGRLK

SEQ ID NO: 51522 - protein, 9 aa, synthetic construct
GLPASGRVR

SEQ ID NO: 51523 - protein, 9 aa, synthetic construct
GLPASGRVK

SEQ ID NO: 51524 - protein, 9 aa, synthetic construct
GLPASGKVR

SEQ ID NO: 51525 - protein, 9 aa, synthetic construct
GLPAVVHLK

SEQ ID NO: 51526 - protein, 9 aa, synthetic construct
GLPAVVHLF

SEQ ID NO: 51527 - protein, 9 aa, synthetic construct
GLPAVVRLR

SEQ ID NO: 51528 - protein, 9 aa, synthetic construct
GLPAVVRLK

SEQ ID NO: 51529 - protein, 9 aa, synthetic construct
GLPAVVRLF

SEQ ID NO: 51530 - protein, 9 aa, synthetic construct
GLPAVVRVY

SEQ ID NO: 51531 - protein, 9 aa, synthetic construct
GLPAVVRVR

SEQ ID NO: 51532 - protein, 9 aa, synthetic construct
GLPAVVRVF

SEQ ID NO: 51533 - protein, 9 aa, synthetic construct
GLPAVVKLR

SEQ ID NO: 51534 - protein, 9 aa, synthetic construct
GLPAVVKLK

SEQ ID NO: 51535 - protein, 9 aa, synthetic construct
GLPAVVKVR

SEQ ID NO: 51536 - protein, 9 aa, synthetic construct
GLPAVLHLY

SEQ ID NO: 51537 - protein, 9 aa, synthetic construct
GLPAVLHLR

SEQ ID NO: 51538 - protein, 9 aa, synthetic construct
GLPAVLHLH

SEQ ID NO: 51539 - protein, 9 aa, synthetic construct
GLPAVLHLF

SEQ ID NO: 51540 - protein, 9 aa, synthetic construct
GLPAVLHVY

SEQ ID NO: 51541 - protein, 9 aa, synthetic construct
GLPAVLHVR

SEQ ID NO: 51542 - protein, 9 aa, synthetic construct
GLPAVLHVF

SEQ ID NO: 51543 - protein, 9 aa, synthetic construct
GLPAVLRLY

SEQ ID NO: 51544 - protein, 9 aa, synthetic construct
GLPAVLRLR

SEQ ID NO: 51545 - protein, 9 aa, synthetic construct
GLPAVLRLK

SEQ ID NO: 51546 - protein, 9 aa, synthetic construct
GLPAVLRLF

SEQ ID NO: 51547 - protein, 9 aa, synthetic construct
GLPAVLRVY

SEQ ID NO: 51548 - protein, 9 aa, synthetic construct
GLPAVLRVR

SEQ ID NO: 51549 - protein, 9 aa, synthetic construct
GLPAVLRVH

SEQ ID NO: 51550 - protein, 9 aa, synthetic construct
GLPAVLRVK

SEQ ID NO: 51551 - protein, 9 aa, synthetic construct
GLPAVLRVF

SEQ ID NO: 51552 - protein, 9 aa, synthetic construct
GLPAVLKLR

SEQ ID NO: 51553 - protein, 9 aa, synthetic construct
GLPAVLKLK

SEQ ID NO: 51554 - protein, 9 aa, synthetic construct
GLPAVLKVH

SEQ ID NO: 51555 - protein, 9 aa, synthetic construct
GLPAVLKVK

SEQ ID NO: 51556 - protein, 9 aa, synthetic construct
GLPAVLKVF

SEQ ID NO: 51557 - protein, 9 aa, synthetic construct
GLPAVARLR

SEQ ID NO: 51558 - protein, 9 aa, synthetic construct
GLPAVARLK

SEQ ID NO: 51559 - protein, 9 aa, synthetic construct
GLPAVARLF

SEQ ID NO: 51560 - protein, 9 aa, synthetic construct
GLPAVARVR

SEQ ID NO: 51561 - protein, 9 aa, synthetic construct
GLPAVARVK

SEQ ID NO: 51562 - protein, 9 aa, synthetic construct
GLPAVAKLR

SEQ ID NO: 51563 - protein, 9 aa, synthetic construct
GLPAVAKLK

SEQ ID NO: 51564 - protein, 9 aa, synthetic construct
GLPAVAKVR

SEQ ID NO: 51565 - protein, 9 aa, synthetic construct
GLPAVAKVK

SEQ ID NO: 51566 - protein, 9 aa, synthetic construct
GLPAVIHLF

SEQ ID NO: 51567 - protein, 9 aa, synthetic construct
GLPAVIRLY

SEQ ID NO: 51568 - protein, 9 aa, synthetic construct
GLPAVIRLK

SEQ ID NO: 51569 - protein, 9 aa, synthetic construct
GLPAVIRLF

SEQ ID NO: 51570 - protein, 9 aa, synthetic construct
GLPAVIRVY

SEQ ID NO: 51571 - protein, 9 aa, synthetic construct
GLPAVIRVR

SEQ ID NO: 51572 - protein, 9 aa, synthetic construct
GLPAVIRVK

SEQ ID NO: 51573 - protein, 9 aa, synthetic construct
GLPAVIRVF

SEQ ID NO: 51574 - protein, 9 aa, synthetic construct
GLPAVIKLR

SEQ ID NO: 51575 - protein, 9 aa, synthetic construct
GLPAVIKVR

SEQ ID NO: 51576 - protein, 9 aa, synthetic construct
GLPAVGRLR

SEQ ID NO: 51577 - protein, 9 aa, synthetic construct
GLPAVGRLH

SEQ ID NO: 51578 - protein, 9 aa, synthetic construct
GLPAVGRLK

SEQ ID NO: 51579 - protein, 9 aa, synthetic construct
GLPAVGRLF

SEQ ID NO: 51580 - protein, 9 aa, synthetic construct
GLPAVGRVR

SEQ ID NO: 51581 - protein, 9 aa, synthetic construct
GLPAVGRVK

SEQ ID NO: 51582 - protein, 9 aa, synthetic construct
GLPAVGKLR

SEQ ID NO: 51583 - protein, 9 aa, synthetic construct
GLPAVGKVK

SEQ ID NO: 51584 - protein, 9 aa, synthetic construct
GLPAGVHLY

SEQ ID NO: 51585 - protein, 9 aa, synthetic construct
GLPAGVHLR

SEQ ID NO: 51586 - protein, 9 aa, synthetic construct
GLPAGVHLH

SEQ ID NO: 51587 - protein, 9 aa, synthetic construct
GLPAGVHLK

SEQ ID NO: 51588 - protein, 9 aa, synthetic construct
GLPAGVHVH

SEQ ID NO: 51589 - protein, 9 aa, synthetic construct
GLPAGVRLR

SEQ ID NO: 51590 - protein, 9 aa, synthetic construct
GLPAGVRLH

SEQ ID NO: 51591 - protein, 9 aa, synthetic construct
GLPAGVRLK

SEQ ID NO: 51592 - protein, 9 aa, synthetic construct
GLPAGVRVR

SEQ ID NO: 51593 - protein, 9 aa, synthetic construct
GLPAGVKVR

SEQ ID NO: 51594 - protein, 9 aa, synthetic construct
GLPAGLHLY

SEQ ID NO: 51595 - protein, 9 aa, synthetic construct
GLPAGLHLR

SEQ ID NO: 51596 - protein, 9 aa, synthetic construct
GLPAGLHLH

SEQ ID NO: 51597 - protein, 9 aa, synthetic construct
GLPAGLHLK

SEQ ID NO: 51598 - protein, 9 aa, synthetic construct
GLPAGLHLF

SEQ ID NO: 51599 - protein, 9 aa, synthetic construct
GLPAGLHVY

SEQ ID NO: 51600 - protein, 9 aa, synthetic construct
GLPAGLHVR

SEQ ID NO: 51601 - protein, 9 aa, synthetic construct
GLPAGLHVH

SEQ ID NO: 51602 - protein, 9 aa, synthetic construct
GLPAGLHVK

SEQ ID NO: 51603 - protein, 9 aa, synthetic construct
GLPAGLHVF

SEQ ID NO: 51604 - protein, 9 aa, synthetic construct
GLPAGLRLY

SEQ ID NO: 51605 - protein, 9 aa, synthetic construct
GLPAGLRLF

SEQ ID NO: 51606 - protein, 9 aa, synthetic construct
GLPAGLRVY

SEQ ID NO: 51607 - protein, 9 aa, synthetic construct
GLPAGLRVR

SEQ ID NO: 51608 - protein, 9 aa, synthetic construct
GLPAGLRVH

SEQ ID NO: 51609 - protein, 9 aa, synthetic construct
GLPAGLRVK

SEQ ID NO: 51610 - protein, 9 aa, synthetic construct
GLPAGLRVF

SEQ ID NO: 51611 - protein, 9 aa, synthetic construct
GLPAGLKLY

SEQ ID NO: 51612 - protein, 9 aa, synthetic construct
GLPAGLKLR

SEQ ID NO: 51613 - protein, 9 aa, synthetic construct
GLPAGLKLK

SEQ ID NO: 51614 - protein, 9 aa, synthetic construct
GLPAGLKLF

SEQ ID NO: 51615 - protein, 9 aa, synthetic construct
GLPAGLKVR

SEQ ID NO: 51616 - protein, 9 aa, synthetic construct
GLPAGARLR

SEQ ID NO: 51617 - protein, 9 aa, synthetic construct
GLPAGARVK

SEQ ID NO: 51618 - protein, 9 aa, synthetic construct
GLPAGAKVR

SEQ ID NO: 51619 - protein, 9 aa, synthetic construct
GLPAGAKVK

SEQ ID NO: 51620 - protein, 9 aa, synthetic construct
GLPAGIHVY

SEQ ID NO: 51621 - protein, 9 aa, synthetic construct
GLPAGIRLR

SEQ ID NO: 51622 - protein, 9 aa, synthetic construct
GLPAGIRLH

SEQ ID NO: 51623 - protein, 9 aa, synthetic construct
GLPAGIRLK

SEQ ID NO: 51624 - protein, 9 aa, synthetic construct
GLPAGIRVH

SEQ ID NO: 51625 - protein, 9 aa, synthetic construct
GLPAGIRVK

SEQ ID NO: 51626 - protein, 9 aa, synthetic construct
GLPAGIKLR

SEQ ID NO: 51627 - protein, 9 aa, synthetic construct
GLPAGIKLK

SEQ ID NO: 51628 - protein, 9 aa, synthetic construct
GLPAGGRLR

SEQ ID NO: 51629 - protein, 9 aa, synthetic construct
GLPAGGRLK

SEQ ID NO: 51630 - protein, 9 aa, synthetic construct
GLPAGGRLF

SEQ ID NO: 51631 - protein, 9 aa, synthetic construct
GLPAGGKLR

SEQ ID NO: 51632 - protein, 9 aa, synthetic construct
GLPAGGKLK

SEQ ID NO: 51633 - protein, 9 aa, synthetic construct
GLPAGGKVR

SEQ ID NO: 51634 - protein, 9 aa, synthetic construct
GLPAGGKVK

SEQ ID NO: 51635 - protein, 9 aa, synthetic construct
GTNGAVRLR

SEQ ID NO: 51636 - protein, 9 aa, synthetic construct
GTNGAVRLK

SEQ ID NO: 51637 - protein, 9 aa, synthetic construct
GTNGAVRVR

SEQ ID NO: 51638 - protein, 9 aa, synthetic construct
GTNGALRLR

SEQ ID NO: 51639 - protein, 9 aa, synthetic construct
GTNGALRLK

SEQ ID NO: 51640 - protein, 9 aa, synthetic construct
GTNGALRVR

SEQ ID NO: 51641 - protein, 9 aa, synthetic construct
GTNGALKLK

SEQ ID NO: 51642 - protein, 9 aa, synthetic construct
GTNGAARLR

SEQ ID NO: 51643 - protein, 9 aa, synthetic construct
GTNGAAKLK

SEQ ID NO: 51644 - protein, 9 aa, synthetic construct
GTNGAIRLR

SEQ ID NO: 51645 - protein, 9 aa, synthetic construct
GTNGAIRLK

SEQ ID NO: 51646 - protein, 9 aa, synthetic construct
GTNGAIKLR

SEQ ID NO: 51647 - protein, 9 aa, synthetic construct
GTNGAIKLK

SEQ ID NO: 51648 - protein, 9 aa, synthetic construct
GTNGAGRLR

SEQ ID NO: 51649 - protein, 9 aa, synthetic construct
GTNGTVRLR

SEQ ID NO: 51650 - protein, 9 aa, synthetic construct
GTNGTVRLK

SEQ ID NO: 51651 - protein, 9 aa, synthetic construct
GTNGTVKLR

SEQ ID NO: 51652 - protein, 9 aa, synthetic construct
GTNGTVKVR

SEQ ID NO: 51653 - protein, 9 aa, synthetic construct
GTNGTLRLR

SEQ ID NO: 51654 - protein, 9 aa, synthetic construct
GTNGTLKLR

SEQ ID NO: 51655 - protein, 9 aa, synthetic construct
GTNGTLKLK

SEQ ID NO: 51656 - protein, 9 aa, synthetic construct
GTNGTARLR

SEQ ID NO: 51657 - protein, 9 aa, synthetic construct
GTNGTAKLK

SEQ ID NO: 51658 - protein, 9 aa, synthetic construct
GTNGTIRLR

SEQ ID NO: 51659 - protein, 9 aa, synthetic construct
GTNGTIRLK

SEQ ID NO: 51660 - protein, 9 aa, synthetic construct
GTNGTGRLR

SEQ ID NO: 51661 - protein, 9 aa, synthetic construct
GTNGTGKLR

SEQ ID NO: 51662 - protein, 9 aa, synthetic construct
GTNGSVRLR

SEQ ID NO: 51663 - protein, 9 aa, synthetic construct
GTNGSVRLK

SEQ ID NO: 51664 - protein, 9 aa, synthetic construct
GTNGSVRVR

SEQ ID NO: 51665 - protein, 9 aa, synthetic construct
GTNGSVKLK

SEQ ID NO: 51666 - protein, 9 aa, synthetic construct
GTNGSLHLF

SEQ ID NO: 51667 - protein, 9 aa, synthetic construct
GTNGSLRLR

SEQ ID NO: 51668 - protein, 9 aa, synthetic construct
GTNGSLRLH

SEQ ID NO: 51669 - protein, 9 aa, synthetic construct
GTNGSLRLK

SEQ ID NO: 51670 - protein, 9 aa, synthetic construct
GTNGSLRLF

SEQ ID NO: 51671 - protein, 9 aa, synthetic construct
GTNGSLRVY

SEQ ID NO: 51672 - protein, 9 aa, synthetic construct
GTNGSLRVR

SEQ ID NO: 51673 - protein, 9 aa, synthetic construct
GTNGSLRVK

SEQ ID NO: 51674 - protein, 9 aa, synthetic construct
GTNGSLKLR

SEQ ID NO: 51675 - protein, 9 aa, synthetic construct
GTNGSLKLK

SEQ ID NO: 51676 - protein, 9 aa, synthetic construct
GTNGSARLR

SEQ ID NO: 51677 - protein, 9 aa, synthetic construct
GTNGSARLK

SEQ ID NO: 51678 - protein, 9 aa, synthetic construct
GTNGSARVR

SEQ ID NO: 51679 - protein, 9 aa, synthetic construct
GTNGSARVK

SEQ ID NO: 51680 - protein, 9 aa, synthetic construct
GTNGSIHLF

SEQ ID NO: 51681 - protein, 9 aa, synthetic construct
GTNGSIRLK

SEQ ID NO: 51682 - protein, 9 aa, synthetic construct
GTNGSIRVK

SEQ ID NO: 51683 - protein, 9 aa, synthetic construct
GTNGSIKLR

SEQ ID NO: 51684 - protein, 9 aa, synthetic construct
GTNGSGRVR

SEQ ID NO: 51685 - protein, 9 aa, synthetic construct
GTNGSGRVK

SEQ ID NO: 51686 - protein, 9 aa, synthetic construct
GTNGSGKVR

SEQ ID NO: 51687 - protein, 9 aa, synthetic construct
GTNGVVHLF

SEQ ID NO: 51688 - protein, 9 aa, synthetic construct
GTNGVVRLY

SEQ ID NO: 51689 - protein, 9 aa, synthetic construct
GTNGVVRLR

SEQ ID NO: 51690 - protein, 9 aa, synthetic construct
GTNGVVKLR

SEQ ID NO: 51691 - protein, 9 aa, synthetic construct
GTNGVVKVY

SEQ ID NO: 51692 - protein, 9 aa, synthetic construct
GTNGVVKVR

SEQ ID NO: 51693 - protein, 9 aa, synthetic construct
GTNGVVKVK

SEQ ID NO: 51694 - protein, 9 aa, synthetic construct
GTNGVLHLR

SEQ ID NO: 51695 - protein, 9 aa, synthetic construct
GTNGVLRVR

SEQ ID NO: 51696 - protein, 9 aa, synthetic construct
GTNGVARLY

SEQ ID NO: 51697 - protein, 9 aa, synthetic construct
GTNGVARLR

SEQ ID NO: 51698 - protein, 9 aa, synthetic construct
GTNGVARLK

SEQ ID NO: 51699 - protein, 9 aa, synthetic construct
GTNGVARVK

SEQ ID NO: 51700 - protein, 9 aa, synthetic construct
GTNGVARVF

SEQ ID NO: 51701 - protein, 9 aa, synthetic construct
GTNGVAKLR

SEQ ID NO: 51702 - protein, 9 aa, synthetic construct
GTNGVAKLK

SEQ ID NO: 51703 - protein, 9 aa, synthetic construct
GTNGVAKVK

SEQ ID NO: 51704 - protein, 9 aa, synthetic construct
GTNGVIRLH

SEQ ID NO: 51705 - protein, 9 aa, synthetic construct
GTNGVIRVR

SEQ ID NO: 51706 - protein, 9 aa, synthetic construct
GTNGVIKLK

SEQ ID NO: 51707 - protein, 9 aa, synthetic construct
GTNGVIKVR

SEQ ID NO: 51708 - protein, 9 aa, synthetic construct
GTNGVIKVK

SEQ ID NO: 51709 - protein, 9 aa, synthetic construct
GTNGVGRLR

SEQ ID NO: 51710 - protein, 9 aa, synthetic construct
GTNGVGRLK

SEQ ID NO: 51711 - protein, 9 aa, synthetic construct
GTNGVGRVR

SEQ ID NO: 51712 - protein, 9 aa, synthetic construct
GTNGVGKLK

SEQ ID NO: 51713 - protein, 9 aa, synthetic construct
GTNGVGKVR

SEQ ID NO: 51714 - protein, 9 aa, synthetic construct
GTNGVGKVK

SEQ ID NO: 51715 - protein, 9 aa, synthetic construct
GTNGGVHVH

SEQ ID NO: 51716 - protein, 9 aa, synthetic construct
GTNGGVRLR

SEQ ID NO: 51717 - protein, 9 aa, synthetic construct
GTNGGVRLK

SEQ ID NO: 51718 - protein, 9 aa, synthetic construct
GTNGGVKVR

SEQ ID NO: 51719 - protein, 9 aa, synthetic construct
GTNGGLHLY

SEQ ID NO: 51720 - protein, 9 aa, synthetic construct
GTNGGLHLR

SEQ ID NO: 51721 - protein, 9 aa, synthetic construct
GTNGGLRLY

SEQ ID NO: 51722 - protein, 9 aa, synthetic construct
GTNGGLRLR

SEQ ID NO: 51723 - protein, 9 aa, synthetic construct
GTNGGLRVY

SEQ ID NO: 51724 - protein, 9 aa, synthetic construct
GTNGGLRVR

SEQ ID NO: 51725 - protein, 9 aa, synthetic construct
GTNGGLRVK

SEQ ID NO: 51726 - protein, 9 aa, synthetic construct
GTNGGLRVF

SEQ ID NO: 51727 - protein, 9 aa, synthetic construct
GTNGGLKLK

SEQ ID NO: 51728 - protein, 9 aa, synthetic construct
GTNGGLKVR

SEQ ID NO: 51729 - protein, 9 aa, synthetic construct
GTNGGLKVK

SEQ ID NO: 51730 - protein, 9 aa, synthetic construct
GTNGGARLR

SEQ ID NO: 51731 - protein, 9 aa, synthetic construct
GTNGGARLK

SEQ ID NO: 51732 - protein, 9 aa, synthetic construct
GTNGGARVR

SEQ ID NO: 51733 - protein, 9 aa, synthetic construct
GTNGGAKLK

SEQ ID NO: 51734 - protein, 9 aa, synthetic construct
GTNGGIRLR

SEQ ID NO: 51735 - protein, 9 aa, synthetic construct
GTNGGGRVK

SEQ ID NO: 51736 - protein, 9 aa, synthetic construct
GTNGGGKVK

SEQ ID NO: 51737 - protein, 9 aa, synthetic construct
GTNAAVRLR

SEQ ID NO: 51738 - protein, 9 aa, synthetic construct
GTNAALRLR

SEQ ID NO: 51739 - protein, 9 aa, synthetic construct
GTNAALKVR

SEQ ID NO: 51740 - protein, 9 aa, synthetic construct
GTNAAARLR

SEQ ID NO: 51741 - protein, 9 aa, synthetic construct
GTNAAIRVK

SEQ ID NO: 51742 - protein, 9 aa, synthetic construct
GTNAAGKVR

SEQ ID NO: 51743 - protein, 9 aa, synthetic construct
GTNATVRLK

SEQ ID NO: 51744 - protein, 9 aa, synthetic construct
GTNATVRVR

SEQ ID NO: 51745 - protein, 9 aa, synthetic construct
GTNATVKVR

SEQ ID NO: 51746 - protein, 9 aa, synthetic construct
GTNATVKVK

SEQ ID NO: 51747 - protein, 9 aa, synthetic construct
GTNATLRLR

SEQ ID NO: 51748 - protein, 9 aa, synthetic construct
GTNATLRLK

SEQ ID NO: 51749 - protein, 9 aa, synthetic construct
GTNATLRVK

SEQ ID NO: 51750 - protein, 9 aa, synthetic construct
GTNATLKVR

SEQ ID NO: 51751 - protein, 9 aa, synthetic construct
GTNATLKVK

SEQ ID NO: 51752 - protein, 9 aa, synthetic construct
GTNATARLR

SEQ ID NO: 51753 - protein, 9 aa, synthetic construct
GTNATARVR

SEQ ID NO: 51754 - protein, 9 aa, synthetic construct
GTNATARVK

SEQ ID NO: 51755 - protein, 9 aa, synthetic construct
GTNATAKVR

SEQ ID NO: 51756 - protein, 9 aa, synthetic construct
GTNATIRVR

SEQ ID NO: 51757 - protein, 9 aa, synthetic construct
GTNATGRVK

SEQ ID NO: 51758 - protein, 9 aa, synthetic construct
GTNATGKVK

SEQ ID NO: 51759 - protein, 9 aa, synthetic construct
GTNASVRLR

SEQ ID NO: 51760 - protein, 9 aa, synthetic construct
GTNASVRVR

SEQ ID NO: 51761 - protein, 9 aa, synthetic construct
GTNASVKLR

SEQ ID NO: 51762 - protein, 9 aa, synthetic construct
GTNASVKLK

SEQ ID NO: 51763 - protein, 9 aa, synthetic construct
GTNASVKVR

SEQ ID NO: 51764 - protein, 9 aa, synthetic construct
GTNASLHLR

SEQ ID NO: 51765 - protein, 9 aa, synthetic construct
GTNASLHLF

SEQ ID NO: 51766 - protein, 9 aa, synthetic construct
GTNASLHVF

SEQ ID NO: 51767 - protein, 9 aa, synthetic construct
GTNASLRLR

SEQ ID NO: 51768 - protein, 9 aa, synthetic construct
GTNASLRLK

SEQ ID NO: 51769 - protein, 9 aa, synthetic construct
GTNASLRVR

SEQ ID NO: 51770 - protein, 9 aa, synthetic construct
GTNASLRVH

SEQ ID NO: 51771 - protein, 9 aa, synthetic construct
GTNASLRVK

SEQ ID NO: 51772 - protein, 9 aa, synthetic construct
GTNASLKLR

SEQ ID NO: 51773 - protein, 9 aa, synthetic construct
GTNASLKLK

SEQ ID NO: 51774 - protein, 9 aa, synthetic construct
GTNASLKVR

SEQ ID NO: 51775 - protein, 9 aa, synthetic construct
GTNASLKVK

SEQ ID NO: 51776 - protein, 9 aa, synthetic construct
GTNASARVR

SEQ ID NO: 51777 - protein, 9 aa, synthetic construct
GTNASARVK

SEQ ID NO: 51778 - protein, 9 aa, synthetic construct
GTNASAKLK

SEQ ID NO: 51779 - protein, 9 aa, synthetic construct
GTNASAKVR

SEQ ID NO: 51780 - protein, 9 aa, synthetic construct
GTNASAKVK

SEQ ID NO: 51781 - protein, 9 aa, synthetic construct
GTNASIRLR

SEQ ID NO: 51782 - protein, 9 aa, synthetic construct
GTNASIRVR

SEQ ID NO: 51783 - protein, 9 aa, synthetic construct
GTNASIKVR

SEQ ID NO: 51784 - protein, 9 aa, synthetic construct
GTNASGRLK

SEQ ID NO: 51785 - protein, 9 aa, synthetic construct
GTNASGRVR

SEQ ID NO: 51786 - protein, 9 aa, synthetic construct
GTNASGKLR

SEQ ID NO: 51787 - protein, 9 aa, synthetic construct
GTNASGKLK

SEQ ID NO: 51788 - protein, 9 aa, synthetic construct
GTNASGKVR

SEQ ID NO: 51789 - protein, 9 aa, synthetic construct
GTNAVVHLR

SEQ ID NO: 51790 - protein, 9 aa, synthetic construct
GTNAVVHLF

SEQ ID NO: 51791 - protein, 9 aa, synthetic construct
GTNAVVRLR

SEQ ID NO: 51792 - protein, 9 aa, synthetic construct
GTNAVVRVR

SEQ ID NO: 51793 - protein, 9 aa, synthetic construct
GTNAVVRVK

SEQ ID NO: 51794 - protein, 9 aa, synthetic construct
GTNAVVKVK

SEQ ID NO: 51795 - protein, 9 aa, synthetic construct
GTNAVLHLY

SEQ ID NO: 51796 - protein, 9 aa, synthetic construct
GTNAVLHLR

SEQ ID NO: 51797 - protein, 9 aa, synthetic construct
GTNAVLHLK

SEQ ID NO: 51798 - protein, 9 aa, synthetic construct
GTNAVLHLF

SEQ ID NO: 51799 - protein, 9 aa, synthetic construct
GTNAVLHVR

SEQ ID NO: 51800 - protein, 9 aa, synthetic construct
GTNAVLRLR

SEQ ID NO: 51801 - protein, 9 aa, synthetic construct
GTNAVLRLK

SEQ ID NO: 51802 - protein, 9 aa, synthetic construct
GTNAVLRVY

SEQ ID NO: 51803 - protein, 9 aa, synthetic construct
GTNAVLRVR

SEQ ID NO: 51804 - protein, 9 aa, synthetic construct
GTNAVLKLK

SEQ ID NO: 51805 - protein, 9 aa, synthetic construct
GTNAVLKVR

SEQ ID NO: 51806 - protein, 9 aa, synthetic construct
GTNAVLKVK

SEQ ID NO: 51807 - protein, 9 aa, synthetic construct
GTNAVARLY

SEQ ID NO: 51808 - protein, 9 aa, synthetic construct
GTNAVARLR

SEQ ID NO: 51809 - protein, 9 aa, synthetic construct
GTNAVARLH

SEQ ID NO: 51810 - protein, 9 aa, synthetic construct
GTNAVARLK

SEQ ID NO: 51811 - protein, 9 aa, synthetic construct
GTNAVARVY

SEQ ID NO: 51812 - protein, 9 aa, synthetic construct
GTNAVARVR

SEQ ID NO: 51813 - protein, 9 aa, synthetic construct
GTNAVARVK

SEQ ID NO: 51814 - protein, 9 aa, synthetic construct
GTNAVAKLR

SEQ ID NO: 51815 - protein, 9 aa, synthetic construct
GTNAVIRVK

SEQ ID NO: 51816 - protein, 9 aa, synthetic construct
GTNAVIKLR

SEQ ID NO: 51817 - protein, 9 aa, synthetic construct
GTNAVGRLR

SEQ ID NO: 51818 - protein, 9 aa, synthetic construct
GTNAVGRVR

SEQ ID NO: 51819 - protein, 9 aa, synthetic construct
GTNAVGKLR

SEQ ID NO: 51820 - protein, 9 aa, synthetic construct
GTNAVGKLK

SEQ ID NO: 51821 - protein, 9 aa, synthetic construct
GTNAGVHLR

SEQ ID NO: 51822 - protein, 9 aa, synthetic construct
GTNAGVHLH

SEQ ID NO: 51823 - protein, 9 aa, synthetic construct
GTNAGVHLK

SEQ ID NO: 51824 - protein, 9 aa, synthetic construct
GTNAGVHLF

SEQ ID NO: 51825 - protein, 9 aa, synthetic construct
GTNAGVHVH

SEQ ID NO: 51826 - protein, 9 aa, synthetic construct
GTNAGVRLR

SEQ ID NO: 51827 - protein, 9 aa, synthetic construct
GTNAGVRLK

SEQ ID NO: 51828 - protein, 9 aa, synthetic construct
GTNAGVRVR

SEQ ID NO: 51829 - protein, 9 aa, synthetic construct
GTNAGVRVK

SEQ ID NO: 51830 - protein, 9 aa, synthetic construct
GTNAGLHLY

SEQ ID NO: 51831 - protein, 9 aa, synthetic construct
GTNAGLHLR

SEQ ID NO: 51832 - protein, 9 aa, synthetic construct
GTNAGLHLH

SEQ ID NO: 51833 - protein, 9 aa, synthetic construct
GTNAGLHLK

SEQ ID NO: 51834 - protein, 9 aa, synthetic construct
GTNAGLHLF

SEQ ID NO: 51835 - protein, 9 aa, synthetic construct
GTNAGLHVY

SEQ ID NO: 51836 - protein, 9 aa, synthetic construct
GTNAGLHVR

SEQ ID NO: 51837 - protein, 9 aa, synthetic construct
GTNAGLHVH

SEQ ID NO: 51838 - protein, 9 aa, synthetic construct
GTNAGLHVF

SEQ ID NO: 51839 - protein, 9 aa, synthetic construct
GTNAGLRLY

SEQ ID NO: 51840 - protein, 9 aa, synthetic construct
GTNAGLRLR

SEQ ID NO: 51841 - protein, 9 aa, synthetic construct
GTNAGLRLK

SEQ ID NO: 51842 - protein, 9 aa, synthetic construct
GTNAGLRLF

SEQ ID NO: 51843 - protein, 9 aa, synthetic construct
GTNAGLRVY

SEQ ID NO: 51844 - protein, 9 aa, synthetic construct
GTNAGLRVR

SEQ ID NO: 51845 - protein, 9 aa, synthetic construct
GTNAGLRVK

SEQ ID NO: 51846 - protein, 9 aa, synthetic construct
GTNAGLKLR

SEQ ID NO: 51847 - protein, 9 aa, synthetic construct
GTNAGLKVR

SEQ ID NO: 51848 - protein, 9 aa, synthetic construct
GTNAGLKVK

SEQ ID NO: 51849 - protein, 9 aa, synthetic construct
GTNAGARLR

SEQ ID NO: 51850 - protein, 9 aa, synthetic construct
GTNAGARLK

SEQ ID NO: 51851 - protein, 9 aa, synthetic construct
GTNAGARVR

SEQ ID NO: 51852 - protein, 9 aa, synthetic construct
GTNAGAKLR

SEQ ID NO: 51853 - protein, 9 aa, synthetic construct
GTNAGAKLK

SEQ ID NO: 51854 - protein, 9 aa, synthetic construct
GTNAGIRLR

SEQ ID NO: 51855 - protein, 9 aa, synthetic construct
GTNAGIRVK

SEQ ID NO: 51856 - protein, 9 aa, synthetic construct
GTNAGIKLR

SEQ ID NO: 51857 - protein, 9 aa, synthetic construct
GTNAGGHVR

SEQ ID NO: 51858 - protein, 9 aa, synthetic construct
GTNAGGRLK

SEQ ID NO: 51859 - protein, 9 aa, synthetic construct
GTQGAVRLR

SEQ ID NO: 51860 - protein, 9 aa, synthetic construct
GTQGAVRLK

SEQ ID NO: 51861 - protein, 9 aa, synthetic construct
GTQGAVKLR

SEQ ID NO: 51862 - protein, 9 aa, synthetic construct
GTQGAVKLK

SEQ ID NO: 51863 - protein, 9 aa, synthetic construct
GTQGALRLR

SEQ ID NO: 51864 - protein, 9 aa, synthetic construct
GTQGALRLK

SEQ ID NO: 51865 - protein, 9 aa, synthetic construct
GTQGALRVR

SEQ ID NO: 51866 - protein, 9 aa, synthetic construct
GTQGALKLY

SEQ ID NO: 51867 - protein, 9 aa, synthetic construct
GTQGALKLR

SEQ ID NO: 51868 - protein, 9 aa, synthetic construct
GTQGALKLK

SEQ ID NO: 51869 - protein, 9 aa, synthetic construct
GTQGALKVR

SEQ ID NO: 51870 - protein, 9 aa, synthetic construct
GTQGAARLR

SEQ ID NO: 51871 - protein, 9 aa, synthetic construct
GTQGAARVR

SEQ ID NO: 51872 - protein, 9 aa, synthetic construct
GTQGAIRLR

SEQ ID NO: 51873 - protein, 9 aa, synthetic construct
GTQGAIRVR

SEQ ID NO: 51874 - protein, 9 aa, synthetic construct
GTQGAIKLK

SEQ ID NO: 51875 - protein, 9 aa, synthetic construct
GTQGAIKVR

SEQ ID NO: 51876 - protein, 9 aa, synthetic construct
GTQGTVRLR

SEQ ID NO: 51877 - protein, 9 aa, synthetic construct
GTQGTVRLK

SEQ ID NO: 51878 - protein, 9 aa, synthetic construct
GTQGTVRVR

SEQ ID NO: 51879 - protein, 9 aa, synthetic construct
GTQGTVKLR

SEQ ID NO: 51880 - protein, 9 aa, synthetic construct
GTQGTVKVK

SEQ ID NO: 51881 - protein, 9 aa, synthetic construct
GTQGTLHLF

SEQ ID NO: 51882 - protein, 9 aa, synthetic construct
GTQGTLRLR

SEQ ID NO: 51883 - protein, 9 aa, synthetic construct
GTQGTLRLK

SEQ ID NO: 51884 - protein, 9 aa, synthetic construct
GTQGTLRVH

SEQ ID NO: 51885 - protein, 9 aa, synthetic construct
GTQGTLRVK

SEQ ID NO: 51886 - protein, 9 aa, synthetic construct
GTQGTLKLR

SEQ ID NO: 51887 - protein, 9 aa, synthetic construct
GTQGTLKLK

SEQ ID NO: 51888 - protein, 9 aa, synthetic construct
GTQGTLKVR

SEQ ID NO: 51889 - protein, 9 aa, synthetic construct
GTQGTLKVK

SEQ ID NO: 51890 - protein, 9 aa, synthetic construct
GTQGTARLR

SEQ ID NO: 51891 - protein, 9 aa, synthetic construct
GTQGTAKVR

SEQ ID NO: 51892 - protein, 9 aa, synthetic construct
GTQGTIRLR

SEQ ID NO: 51893 - protein, 9 aa, synthetic construct
GTQGTIRLK

SEQ ID NO: 51894 - protein, 9 aa, synthetic construct
GTQGTIRVR

SEQ ID NO: 51895 - protein, 9 aa, synthetic construct
GTQGTIKLR

SEQ ID NO: 51896 - protein, 9 aa, synthetic construct
GTQGTIKLK

SEQ ID NO: 51897 - protein, 9 aa, synthetic construct
GTQGTIKVR

SEQ ID NO: 51898 - protein, 9 aa, synthetic construct
GTQGTIKVK

SEQ ID NO: 51899 - protein, 9 aa, synthetic construct
GTQGTGRLR

SEQ ID NO: 51900 - protein, 9 aa, synthetic construct
GTQGTGRVR

SEQ ID NO: 51901 - protein, 9 aa, synthetic construct
GTQGTGKLK

SEQ ID NO: 51902 - protein, 9 aa, synthetic construct
GTQGTGKVH

SEQ ID NO: 51903 - protein, 9 aa, synthetic construct
GTQGSVHVH

SEQ ID NO: 51904 - protein, 9 aa, synthetic construct
GTQGSVRLR

SEQ ID NO: 51905 - protein, 9 aa, synthetic construct
GTQGSVRLK

SEQ ID NO: 51906 - protein, 9 aa, synthetic construct
GTQGSVRVR

SEQ ID NO: 51907 - protein, 9 aa, synthetic construct
GTQGSVKLR

SEQ ID NO: 51908 - protein, 9 aa, synthetic construct
GTQGSVKLK

SEQ ID NO: 51909 - protein, 9 aa, synthetic construct
GTQGSLRLY

SEQ ID NO: 51910 - protein, 9 aa, synthetic construct
GTQGSLRLR

SEQ ID NO: 51911 - protein, 9 aa, synthetic construct
GTQGSLRLK

SEQ ID NO: 51912 - protein, 9 aa, synthetic construct
GTQGSLRLF

SEQ ID NO: 51913 - protein, 9 aa, synthetic construct
GTQGSLRVY

SEQ ID NO: 51914 - protein, 9 aa, synthetic construct
GTQGSLRVR

SEQ ID NO: 51915 - protein, 9 aa, synthetic construct
GTQGSLRVK

SEQ ID NO: 51916 - protein, 9 aa, synthetic construct
GTQGSLKLR

SEQ ID NO: 51917 - protein, 9 aa, synthetic construct
GTQGSLKLK

SEQ ID NO: 51918 - protein, 9 aa, synthetic construct
GTQGSLKVR

SEQ ID NO: 51919 - protein, 9 aa, synthetic construct
GTQGSLKVK

SEQ ID NO: 51920 - protein, 9 aa, synthetic construct
GTQGSARLR

SEQ ID NO: 51921 - protein, 9 aa, synthetic construct
GTQGSARVR

SEQ ID NO: 51922 - protein, 9 aa, synthetic construct
GTQGSARVH

SEQ ID NO: 51923 - protein, 9 aa, synthetic construct
GTQGSARVK

SEQ ID NO: 51924 - protein, 9 aa, synthetic construct
GTQGSAKLR

SEQ ID NO: 51925 - protein, 9 aa, synthetic construct
GTQGSAKLK

SEQ ID NO: 51926 - protein, 9 aa, synthetic construct
GTQGSAKVR

SEQ ID NO: 51927 - protein, 9 aa, synthetic construct
GTQGSAKVK

SEQ ID NO: 51928 - protein, 9 aa, synthetic construct
GTQGSIRLR

SEQ ID NO: 51929 - protein, 9 aa, synthetic construct
GTQGSIRVR

SEQ ID NO: 51930 - protein, 9 aa, synthetic construct
GTQGSIRVK

SEQ ID NO: 51931 - protein, 9 aa, synthetic construct
GTQGSGRVK

SEQ ID NO: 51932 - protein, 9 aa, synthetic construct
GTQGSGKLK

SEQ ID NO: 51933 - protein, 9 aa, synthetic construct
GTQGVVHLF

SEQ ID NO: 51934 - protein, 9 aa, synthetic construct
GTQGVVRLR

SEQ ID NO: 51935 - protein, 9 aa, synthetic construct
GTQGVVRLK

SEQ ID NO: 51936 - protein, 9 aa, synthetic construct
GTQGVVKLR

SEQ ID NO: 51937 - protein, 9 aa, synthetic construct
GTQGVVKVR

SEQ ID NO: 51938 - protein, 9 aa, synthetic construct
GTQGVLRLR

SEQ ID NO: 51939 - protein, 9 aa, synthetic construct
GTQGVLRLK

SEQ ID NO: 51940 - protein, 9 aa, synthetic construct
GTQGVLRVR

SEQ ID NO: 51941 - protein, 9 aa, synthetic construct
GTQGVLKLK

SEQ ID NO: 51942 - protein, 9 aa, synthetic construct
GTQGVARLK

SEQ ID NO: 51943 - protein, 9 aa, synthetic construct
GTQGVARVY

SEQ ID NO: 51944 - protein, 9 aa, synthetic construct
GTQGVARVR

SEQ ID NO: 51945 - protein, 9 aa, synthetic construct
GTQGVARVH

SEQ ID NO: 51946 - protein, 9 aa, synthetic construct
GTQGVARVK

SEQ ID NO: 51947 - protein, 9 aa, synthetic construct
GTQGVAKLR

SEQ ID NO: 51948 - protein, 9 aa, synthetic construct
GTQGVAKLK

SEQ ID NO: 51949 - protein, 9 aa, synthetic construct
GTQGVAKVR

SEQ ID NO: 51950 - protein, 9 aa, synthetic construct
GTQGVAKVK

SEQ ID NO: 51951 - protein, 9 aa, synthetic construct
GTQGVIRVY

SEQ ID NO: 51952 - protein, 9 aa, synthetic construct
GTQGVIRVR

SEQ ID NO: 51953 - protein, 9 aa, synthetic construct
GTQGVIRVK

SEQ ID NO: 51954 - protein, 9 aa, synthetic construct
GTQGVIKVK

SEQ ID NO: 51955 - protein, 9 aa, synthetic construct
GTQGVGKVR

SEQ ID NO: 51956 - protein, 9 aa, synthetic construct
GTQGVGKVK

SEQ ID NO: 51957 - protein, 9 aa, synthetic construct
GTQGGVHVH

SEQ ID NO: 51958 - protein, 9 aa, synthetic construct
GTQGGVRLR

SEQ ID NO: 51959 - protein, 9 aa, synthetic construct
GTQGGVRLK

SEQ ID NO: 51960 - protein, 9 aa, synthetic construct
GTQGGVRVK

SEQ ID NO: 51961 - protein, 9 aa, synthetic construct
GTQGGLHLR

SEQ ID NO: 51962 - protein, 9 aa, synthetic construct
GTQGGLHLH

SEQ ID NO: 51963 - protein, 9 aa, synthetic construct
GTQGGLRLY

SEQ ID NO: 51964 - protein, 9 aa, synthetic construct
GTQGGLRLR

SEQ ID NO: 51965 - protein, 9 aa, synthetic construct
GTQGGLRLH

SEQ ID NO: 51966 - protein, 9 aa, synthetic construct
GTQGGLRLK

SEQ ID NO: 51967 - protein, 9 aa, synthetic construct
GTQGGLRLF

SEQ ID NO: 51968 - protein, 9 aa, synthetic construct
GTQGGLRVY

SEQ ID NO: 51969 - protein, 9 aa, synthetic construct
GTQGGLRVR

SEQ ID NO: 51970 - protein, 9 aa, synthetic construct
GTQGGLRVH

SEQ ID NO: 51971 - protein, 9 aa, synthetic construct
GTQGGLRVK

SEQ ID NO: 51972 - protein, 9 aa, synthetic construct
GTQGGLKLK

SEQ ID NO: 51973 - protein, 9 aa, synthetic construct
GTQGGARLR

SEQ ID NO: 51974 - protein, 9 aa, synthetic construct
GTQGGARVR

SEQ ID NO: 51975 - protein, 9 aa, synthetic construct
GTQGGARVK

SEQ ID NO: 51976 - protein, 9 aa, synthetic construct
GTQGGAKLR

SEQ ID NO: 51977 - protein, 9 aa, synthetic construct
GTQGGAKVK

SEQ ID NO: 51978 - protein, 9 aa, synthetic construct
GTQGGIKLR

SEQ ID NO: 51979 - protein, 9 aa, synthetic construct
GTQGGIKLK

SEQ ID NO: 51980 - protein, 9 aa, synthetic construct
GTQGGGRLR

SEQ ID NO: 51981 - protein, 9 aa, synthetic construct
GTQGGGRVR

SEQ ID NO: 51982 - protein, 9 aa, synthetic construct
GTQGGGKLK

SEQ ID NO: 51983 - protein, 9 aa, synthetic construct
GTQAAVRLR

SEQ ID NO: 51984 - protein, 9 aa, synthetic construct
GTQAAVRLK

SEQ ID NO: 51985 - protein, 9 aa, synthetic construct
GTQAAVRVK

SEQ ID NO: 51986 - protein, 9 aa, synthetic construct
GTQAAVKLK

SEQ ID NO: 51987 - protein, 9 aa, synthetic construct
GTQAALHLR

SEQ ID NO: 51988 - protein, 9 aa, synthetic construct
GTQAALHVR

SEQ ID NO: 51989 - protein, 9 aa, synthetic construct
GTQAALRLR

SEQ ID NO: 51990 - protein, 9 aa, synthetic construct
GTQAALRLH

SEQ ID NO: 51991 - protein, 9 aa, synthetic construct
GTQAALRLK

SEQ ID NO: 51992 - protein, 9 aa, synthetic construct
GTQAALRLF

SEQ ID NO: 51993 - protein, 9 aa, synthetic construct
GTQAALRVY

SEQ ID NO: 51994 - protein, 9 aa, synthetic construct
GTQAALRVR

SEQ ID NO: 51995 - protein, 9 aa, synthetic construct
GTQAALRVK

SEQ ID NO: 51996 - protein, 9 aa, synthetic construct
GTQAALRVF

SEQ ID NO: 51997 - protein, 9 aa, synthetic construct
GTQAALKLY

SEQ ID NO: 51998 - protein, 9 aa, synthetic construct
GTQAALKLR

SEQ ID NO: 51999 - protein, 9 aa, synthetic construct
GTQAALKLK

SEQ ID NO: 52000 - protein, 9 aa, synthetic construct
GTQAALKVR

SEQ ID NO: 52001 - protein, 9 aa, synthetic construct
GTQAAARLR

SEQ ID NO: 52002 - protein, 9 aa, synthetic construct
GTQAAARLK

SEQ ID NO: 52003 - protein, 9 aa, synthetic construct
GTQAAAKLK

SEQ ID NO: 52004 - protein, 9 aa, synthetic construct
GTQAAIRLR

SEQ ID NO: 52005 - protein, 9 aa, synthetic construct
GTQAAIRLK

SEQ ID NO: 52006 - protein, 9 aa, synthetic construct
GTQAAIRVK

SEQ ID NO: 52007 - protein, 9 aa, synthetic construct
GTQAAIKLR

SEQ ID NO: 52008 - protein, 9 aa, synthetic construct
GTQAAIKVK

SEQ ID NO: 52009 - protein, 9 aa, synthetic construct
GTQAAGRLR

SEQ ID NO: 52010 - protein, 9 aa, synthetic construct
GTQAAGKLK

SEQ ID NO: 52011 - protein, 9 aa, synthetic construct
GTQATVRLK

SEQ ID NO: 52012 - protein, 9 aa, synthetic construct
GTQATVRVR

SEQ ID NO: 52013 - protein, 9 aa, synthetic construct
GTQATVRVK

SEQ ID NO: 52014 - protein, 9 aa, synthetic construct
GTQATVKVK

SEQ ID NO: 52015 - protein, 9 aa, synthetic construct
GTQATLRLR

SEQ ID NO: 52016 - protein, 9 aa, synthetic construct
GTQATLRLK

SEQ ID NO: 52017 - protein, 9 aa, synthetic construct
GTQATLRVY

SEQ ID NO: 52018 - protein, 9 aa, synthetic construct
GTQATLRVR

SEQ ID NO: 52019 - protein, 9 aa, synthetic construct
GTQATLRVH

SEQ ID NO: 52020 - protein, 9 aa, synthetic construct
GTQATLRVK

SEQ ID NO: 52021 - protein, 9 aa, synthetic construct
GTQATLKLR

SEQ ID NO: 52022 - protein, 9 aa, synthetic construct
GTQATLKLK

SEQ ID NO: 52023 - protein, 9 aa, synthetic construct
GTQATLKVY

SEQ ID NO: 52024 - protein, 9 aa, synthetic construct
GTQATLKVR

SEQ ID NO: 52025 - protein, 9 aa, synthetic construct
GTQATLKVH

SEQ ID NO: 52026 - protein, 9 aa, synthetic construct
GTQATLKVK

SEQ ID NO: 52027 - protein, 9 aa, synthetic construct
GTQATARLR

SEQ ID NO: 52028 - protein, 9 aa, synthetic construct
GTQATARLK

SEQ ID NO: 52029 - protein, 9 aa, synthetic construct
GTQATARVR

SEQ ID NO: 52030 - protein, 9 aa, synthetic construct
GTQATARVK

SEQ ID NO: 52031 - protein, 9 aa, synthetic construct
GTQATAKLK

SEQ ID NO: 52032 - protein, 9 aa, synthetic construct
GTQATAKVR

SEQ ID NO: 52033 - protein, 9 aa, synthetic construct
GTQATIRLR

SEQ ID NO: 52034 - protein, 9 aa, synthetic construct
GTQATIRLK

SEQ ID NO: 52035 - protein, 9 aa, synthetic construct
GTQATIRVY

SEQ ID NO: 52036 - protein, 9 aa, synthetic construct
GTQATIRVH

SEQ ID NO: 52037 - protein, 9 aa, synthetic construct
GTQATIRVK

SEQ ID NO: 52038 - protein, 9 aa, synthetic construct
GTQATIKLR

SEQ ID NO: 52039 - protein, 9 aa, synthetic construct
GTQATIKLK

SEQ ID NO: 52040 - protein, 9 aa, synthetic construct
GTQATIKVK

SEQ ID NO: 52041 - protein, 9 aa, synthetic construct
GTQATGRLR

SEQ ID NO: 52042 - protein, 9 aa, synthetic construct
GTQATGRVR

SEQ ID NO: 52043 - protein, 9 aa, synthetic construct
GTQATGKLR

SEQ ID NO: 52044 - protein, 9 aa, synthetic construct
GTQATGKLK

SEQ ID NO: 52045 - protein, 9 aa, synthetic construct
GTQATGKVR

SEQ ID NO: 52046 - protein, 9 aa, synthetic construct
GTQATGKVK

SEQ ID NO: 52047 - protein, 9 aa, synthetic construct
GTQASVHVH

SEQ ID NO: 52048 - protein, 9 aa, synthetic construct
GTQASVRVR

SEQ ID NO: 52049 - protein, 9 aa, synthetic construct
GTQASVRVK

SEQ ID NO: 52050 - protein, 9 aa, synthetic construct
GTQASVKLR

SEQ ID NO: 52051 - protein, 9 aa, synthetic construct
GTQASVKVR

SEQ ID NO: 52052 - protein, 9 aa, synthetic construct
GTQASVKVK

SEQ ID NO: 52053 - protein, 9 aa, synthetic construct
GTQASLHLY

SEQ ID NO: 52054 - protein, 9 aa, synthetic construct
GTQASLHLR

SEQ ID NO: 52055 - protein, 9 aa, synthetic construct
GTQASLHVY

SEQ ID NO: 52056 - protein, 9 aa, synthetic construct
GTQASLHVF

SEQ ID NO: 52057 - protein, 9 aa, synthetic construct
GTQASLRLY

SEQ ID NO: 52058 - protein, 9 aa, synthetic construct
GTQASLRLR

SEQ ID NO: 52059 - protein, 9 aa, synthetic construct
GTQASLRLH

SEQ ID NO: 52060 - protein, 9 aa, synthetic construct
GTQASLRLK

SEQ ID NO: 52061 - protein, 9 aa, synthetic construct
GTQASLRLF

SEQ ID NO: 52062 - protein, 9 aa, synthetic construct
GTQASLRVY

SEQ ID NO: 52063 - protein, 9 aa, synthetic construct
GTQASLRVR

SEQ ID NO: 52064 - protein, 9 aa, synthetic construct
GTQASLRVH

SEQ ID NO: 52065 - protein, 9 aa, synthetic construct
GTQASLRVK

SEQ ID NO: 52066 - protein, 9 aa, synthetic construct
GTQASLKLR

SEQ ID NO: 52067 - protein, 9 aa, synthetic construct
GTQASLKLH

SEQ ID NO: 52068 - protein, 9 aa, synthetic construct
GTQASLKLK

SEQ ID NO: 52069 - protein, 9 aa, synthetic construct
GTQASLKVR

SEQ ID NO: 52070 - protein, 9 aa, synthetic construct
GTQASLKVK

SEQ ID NO: 52071 - protein, 9 aa, synthetic construct
GTQASARLR

SEQ ID NO: 52072 - protein, 9 aa, synthetic construct
GTQASARLK

SEQ ID NO: 52073 - protein, 9 aa, synthetic construct
GTQASARVR

SEQ ID NO: 52074 - protein, 9 aa, synthetic construct
GTQASARVH

SEQ ID NO: 52075 - protein, 9 aa, synthetic construct
GTQASARVK

SEQ ID NO: 52076 - protein, 9 aa, synthetic construct
GTQASAKLR

SEQ ID NO: 52077 - protein, 9 aa, synthetic construct
GTQASAKLK

SEQ ID NO: 52078 - protein, 9 aa, synthetic construct
GTQASAKVR

SEQ ID NO: 52079 - protein, 9 aa, synthetic construct
GTQASAKVK

SEQ ID NO: 52080 - protein, 9 aa, synthetic construct
GTQASIRLR

SEQ ID NO: 52081 - protein, 9 aa, synthetic construct
GTQASIRVY

SEQ ID NO: 52082 - protein, 9 aa, synthetic construct
GTQASIRVR

SEQ ID NO: 52083 - protein, 9 aa, synthetic construct
GTQASIRVK

SEQ ID NO: 52084 - protein, 9 aa, synthetic construct
GTQASIRVF

SEQ ID NO: 52085 - protein, 9 aa, synthetic construct
GTQASGKVR

SEQ ID NO: 52086 - protein, 9 aa, synthetic construct
GTQAVVHLR

SEQ ID NO: 52087 - protein, 9 aa, synthetic construct
GTQAVVHLK

SEQ ID NO: 52088 - protein, 9 aa, synthetic construct
GTQAVVRLK

SEQ ID NO: 52089 - protein, 9 aa, synthetic construct
GTQAVVRVK

SEQ ID NO: 52090 - protein, 9 aa, synthetic construct
GTQAVVKLR

SEQ ID NO: 52091 - protein, 9 aa, synthetic construct
GTQAVVKLK

SEQ ID NO: 52092 - protein, 9 aa, synthetic construct
GTQAVVKLF

SEQ ID NO: 52093 - protein, 9 aa, synthetic construct
GTQAVVKVR

SEQ ID NO: 52094 - protein, 9 aa, synthetic construct
GTQAVVKVK

SEQ ID NO: 52095 - protein, 9 aa, synthetic construct
GTQAVLHLY

SEQ ID NO: 52096 - protein, 9 aa, synthetic construct
GTQAVLHLR

SEQ ID NO: 52097 - protein, 9 aa, synthetic construct
GTQAVLHLH

SEQ ID NO: 52098 - protein, 9 aa, synthetic construct
GTQAVLHLK

SEQ ID NO: 52099 - protein, 9 aa, synthetic construct
GTQAVLHLF

SEQ ID NO: 52100 - protein, 9 aa, synthetic construct
GTQAVLHVY

SEQ ID NO: 52101 - protein, 9 aa, synthetic construct
GTQAVLHVK

SEQ ID NO: 52102 - protein, 9 aa, synthetic construct
GTQAVLHVF

SEQ ID NO: 52103 - protein, 9 aa, synthetic construct
GTQAVLRLY

SEQ ID NO: 52104 - protein, 9 aa, synthetic construct
GTQAVLRLR

SEQ ID NO: 52105 - protein, 9 aa, synthetic construct
GTQAVLRLK

SEQ ID NO: 52106 - protein, 9 aa, synthetic construct
GTQAVLRLF

SEQ ID NO: 52107 - protein, 9 aa, synthetic construct
GTQAVLRVY

SEQ ID NO: 52108 - protein, 9 aa, synthetic construct
GTQAVLRVR

SEQ ID NO: 52109 - protein, 9 aa, synthetic construct
GTQAVLRVH

SEQ ID NO: 52110 - protein, 9 aa, synthetic construct
GTQAVLRVK

SEQ ID NO: 52111 - protein, 9 aa, synthetic construct
GTQAVLRVF

SEQ ID NO: 52112 - protein, 9 aa, synthetic construct
GTQAVLKLR

SEQ ID NO: 52113 - protein, 9 aa, synthetic construct
GTQAVLKLK

SEQ ID NO: 52114 - protein, 9 aa, synthetic construct
GTQAVLKLF

SEQ ID NO: 52115 - protein, 9 aa, synthetic construct
GTQAVLKVR

SEQ ID NO: 52116 - protein, 9 aa, synthetic construct
GTQAVLKVH

SEQ ID NO: 52117 - protein, 9 aa, synthetic construct
GTQAVLKVK

SEQ ID NO: 52118 - protein, 9 aa, synthetic construct
GTQAVLKVF

SEQ ID NO: 52119 - protein, 9 aa, synthetic construct
GTQAVAHLR

SEQ ID NO: 52120 - protein, 9 aa, synthetic construct
GTQAVARLY

SEQ ID NO: 52121 - protein, 9 aa, synthetic construct
GTQAVARLR

SEQ ID NO: 52122 - protein, 9 aa, synthetic construct
GTQAVARLK

SEQ ID NO: 52123 - protein, 9 aa, synthetic construct
GTQAVARVY

SEQ ID NO: 52124 - protein, 9 aa, synthetic construct
GTQAVARVR

SEQ ID NO: 52125 - protein, 9 aa, synthetic construct
GTQAVARVK

SEQ ID NO: 52126 - protein, 9 aa, synthetic construct
GTQAVAKLR

SEQ ID NO: 52127 - protein, 9 aa, synthetic construct
GTQAVAKLK

SEQ ID NO: 52128 - protein, 9 aa, synthetic construct
GTQAVAKVY

SEQ ID NO: 52129 - protein, 9 aa, synthetic construct
GTQAVAKVR

SEQ ID NO: 52130 - protein, 9 aa, synthetic construct
GTQAVAKVH

SEQ ID NO: 52131 - protein, 9 aa, synthetic construct
GTQAVAKVK

SEQ ID NO: 52132 - protein, 9 aa, synthetic construct
GTQAVAKVF

SEQ ID NO: 52133 - protein, 9 aa, synthetic construct
GTQAVIHVF

SEQ ID NO: 52134 - protein, 9 aa, synthetic construct
GTQAVIRLR

SEQ ID NO: 52135 - protein, 9 aa, synthetic construct
GTQAVIRLK

SEQ ID NO: 52136 - protein, 9 aa, synthetic construct
GTQAVIRLF

SEQ ID NO: 52137 - protein, 9 aa, synthetic construct
GTQAVIRVR

SEQ ID NO: 52138 - protein, 9 aa, synthetic construct
GTQAVIRVK

SEQ ID NO: 52139 - protein, 9 aa, synthetic construct
GTQAVIKLR

SEQ ID NO: 52140 - protein, 9 aa, synthetic construct
GTQAVIKVY

SEQ ID NO: 52141 - protein, 9 aa, synthetic construct
GTQAVIKVR

SEQ ID NO: 52142 - protein, 9 aa, synthetic construct
GTQAVIKVK

SEQ ID NO: 52143 - protein, 9 aa, synthetic construct
GTQAVGRLK

SEQ ID NO: 52144 - protein, 9 aa, synthetic construct
GTQAVGKLR

SEQ ID NO: 52145 - protein, 9 aa, synthetic construct
GTQAVGKVK

SEQ ID NO: 52146 - protein, 9 aa, synthetic construct
GTQAGVHLY

SEQ ID NO: 52147 - protein, 9 aa, synthetic construct
GTQAGVHLR

SEQ ID NO: 52148 - protein, 9 aa, synthetic construct
GTQAGVHLH

SEQ ID NO: 52149 - protein, 9 aa, synthetic construct
GTQAGVHLK

SEQ ID NO: 52150 - protein, 9 aa, synthetic construct
GTQAGVHLF

SEQ ID NO: 52151 - protein, 9 aa, synthetic construct
GTQAGVHVH

SEQ ID NO: 52152 - protein, 9 aa, synthetic construct
GTQAGVRLY

SEQ ID NO: 52153 - protein, 9 aa, synthetic construct
GTQAGVRLR

SEQ ID NO: 52154 - protein, 9 aa, synthetic construct
GTQAGVRLH

SEQ ID NO: 52155 - protein, 9 aa, synthetic construct
GTQAGVRLK

SEQ ID NO: 52156 - protein, 9 aa, synthetic construct
GTQAGVRVR

SEQ ID NO: 52157 - protein, 9 aa, synthetic construct
GTQAGVRVK

SEQ ID NO: 52158 - protein, 9 aa, synthetic construct
GTQAGVKLR

SEQ ID NO: 52159 - protein, 9 aa, synthetic construct
GTQAGVKLK

SEQ ID NO: 52160 - protein, 9 aa, synthetic construct
GTQAGVKVR

SEQ ID NO: 52161 - protein, 9 aa, synthetic construct
GTQAGVKVK

SEQ ID NO: 52162 - protein, 9 aa, synthetic construct
GTQAGLHLY

SEQ ID NO: 52163 - protein, 9 aa, synthetic construct
GTQAGLHLR

SEQ ID NO: 52164 - protein, 9 aa, synthetic construct
GTQAGLHLH

SEQ ID NO: 52165 - protein, 9 aa, synthetic construct
GTQAGLHLK

SEQ ID NO: 52166 - protein, 9 aa, synthetic construct
GTQAGLHLF

SEQ ID NO: 52167 - protein, 9 aa, synthetic construct
GTQAGLHVY

SEQ ID NO: 52168 - protein, 9 aa, synthetic construct
GTQAGLHVR

SEQ ID NO: 52169 - protein, 9 aa, synthetic construct
GTQAGLHVH

SEQ ID NO: 52170 - protein, 9 aa, synthetic construct
GTQAGLHVF

SEQ ID NO: 52171 - protein, 9 aa, synthetic construct
GTQAGLRLY

SEQ ID NO: 52172 - protein, 9 aa, synthetic construct
GTQAGLRLR

SEQ ID NO: 52173 - protein, 9 aa, synthetic construct
GTQAGLRLH

SEQ ID NO: 52174 - protein, 9 aa, synthetic construct
GTQAGLRLK

SEQ ID NO: 52175 - protein, 9 aa, synthetic construct
GTQAGLRLF

SEQ ID NO: 52176 - protein, 9 aa, synthetic construct
GTQAGLRVY

SEQ ID NO: 52177 - protein, 9 aa, synthetic construct
GTQAGLRVR

SEQ ID NO: 52178 - protein, 9 aa, synthetic construct
GTQAGLRVH

SEQ ID NO: 52179 - protein, 9 aa, synthetic construct
GTQAGLRVK

SEQ ID NO: 52180 - protein, 9 aa, synthetic construct
GTQAGLRVF

SEQ ID NO: 52181 - protein, 9 aa, synthetic construct
GTQAGLKLY

SEQ ID NO: 52182 - protein, 9 aa, synthetic construct
GTQAGLKLR

SEQ ID NO: 52183 - protein, 9 aa, synthetic construct
GTQAGLKLK

SEQ ID NO: 52184 - protein, 9 aa, synthetic construct
GTQAGLKLF

SEQ ID NO: 52185 - protein, 9 aa, synthetic construct
GTQAGLKVY

SEQ ID NO: 52186 - protein, 9 aa, synthetic construct
GTQAGARLR

SEQ ID NO: 52187 - protein, 9 aa, synthetic construct
GTQAGARLH

SEQ ID NO: 52188 - protein, 9 aa, synthetic construct
GTQAGARLK

SEQ ID NO: 52189 - protein, 9 aa, synthetic construct
GTQAGARLF

SEQ ID NO: 52190 - protein, 9 aa, synthetic construct
GTQAGARVR

SEQ ID NO: 52191 - protein, 9 aa, synthetic construct
GTQAGAKLR

SEQ ID NO: 52192 - protein, 9 aa, synthetic construct
GTQAGAKLK

SEQ ID NO: 52193 - protein, 9 aa, synthetic construct
GTQAGAKVR

SEQ ID NO: 52194 - protein, 9 aa, synthetic construct
GTQAGAKVK

SEQ ID NO: 52195 - protein, 9 aa, synthetic construct
GTQAGIRLY

SEQ ID NO: 52196 - protein, 9 aa, synthetic construct
GTQAGIRLR

SEQ ID NO: 52197 - protein, 9 aa, synthetic construct
GTQAGIRLK

SEQ ID NO: 52198 - protein, 9 aa, synthetic construct
GTQAGIRVR

SEQ ID NO: 52199 - protein, 9 aa, synthetic construct
GTQAGIKLR

SEQ ID NO: 52200 - protein, 9 aa, synthetic construct
GTQAGIKLK

SEQ ID NO: 52201 - protein, 9 aa, synthetic construct
GTQAGGHLR

SEQ ID NO: 52202 - protein, 9 aa, synthetic construct
GTQAGGRLR

SEQ ID NO: 52203 - protein, 9 aa, synthetic construct
GTQAGGRLK

SEQ ID NO: 52204 - protein, 9 aa, synthetic construct
GTQAGGRVK

SEQ ID NO: 52205 - protein, 9 aa, synthetic construct
GTQAGGKLR

SEQ ID NO: 52206 - protein, 9 aa, synthetic construct
GTQAGGKLK

SEQ ID NO: 52207 - protein, 9 aa, synthetic construct
GTQAGGKVR

SEQ ID NO: 52208 - protein, 9 aa, synthetic construct
GTPGAVRLR

SEQ ID NO: 52209 - protein, 9 aa, synthetic construct
GTPGAVKLR

SEQ ID NO: 52210 - protein, 9 aa, synthetic construct
GTPGALRLR

SEQ ID NO: 52211 - protein, 9 aa, synthetic construct
GTPGALRLK

SEQ ID NO: 52212 - protein, 9 aa, synthetic construct
GTPGALRLF

SEQ ID NO: 52213 - protein, 9 aa, synthetic construct
GTPGALKLK

SEQ ID NO: 52214 - protein, 9 aa, synthetic construct
GTPGAIRLR

SEQ ID NO: 52215 - protein, 9 aa, synthetic construct
GTPGAIRLK

SEQ ID NO: 52216 - protein, 9 aa, synthetic construct
GTPGAIKLR

SEQ ID NO: 52217 - protein, 9 aa, synthetic construct
GTPGAGRLK

SEQ ID NO: 52218 - protein, 9 aa, synthetic construct
GTPGTVRLR

SEQ ID NO: 52219 - protein, 9 aa, synthetic construct
GTPGTVKLR

SEQ ID NO: 52220 - protein, 9 aa, synthetic construct
GTPGTLRLR

SEQ ID NO: 52221 - protein, 9 aa, synthetic construct
GTPGTLKLK

SEQ ID NO: 52222 - protein, 9 aa, synthetic construct
GTPGTLKVR

SEQ ID NO: 52223 - protein, 9 aa, synthetic construct
GTPGTLKVK

SEQ ID NO: 52224 - protein, 9 aa, synthetic construct
GTPGTARVR

SEQ ID NO: 52225 - protein, 9 aa, synthetic construct
GTPGTAKVR

SEQ ID NO: 52226 - protein, 9 aa, synthetic construct
GTPGTIRVR

SEQ ID NO: 52227 - protein, 9 aa, synthetic construct
GTPGTIKVK

SEQ ID NO: 52228 - protein, 9 aa, synthetic construct
GTPGSVHVH

SEQ ID NO: 52229 - protein, 9 aa, synthetic construct
GTPGSVRLY

SEQ ID NO: 52230 - protein, 9 aa, synthetic construct
GTPGSVRLR

SEQ ID NO: 52231 - protein, 9 aa, synthetic construct
GTPGSVRLK

SEQ ID NO: 52232 - protein, 9 aa, synthetic construct
GTPGSVRVR

SEQ ID NO: 52233 - protein, 9 aa, synthetic construct
GTPGSVRVK

SEQ ID NO: 52234 - protein, 9 aa, synthetic construct
GTPGSVKLH

SEQ ID NO: 52235 - protein, 9 aa, synthetic construct
GTPGSLRLR

SEQ ID NO: 52236 - protein, 9 aa, synthetic construct
GTPGSLRLK

SEQ ID NO: 52237 - protein, 9 aa, synthetic construct
GTPGSLRVR

SEQ ID NO: 52238 - protein, 9 aa, synthetic construct
GTPGSLRVH

SEQ ID NO: 52239 - protein, 9 aa, synthetic construct
GTPGSLRVK

SEQ ID NO: 52240 - protein, 9 aa, synthetic construct
GTPGSLKLR

SEQ ID NO: 52241 - protein, 9 aa, synthetic construct
GTPGSLKLK

SEQ ID NO: 52242 - protein, 9 aa, synthetic construct
GTPGSLKVR

SEQ ID NO: 52243 - protein, 9 aa, synthetic construct
GTPGSARLH

SEQ ID NO: 52244 - protein, 9 aa, synthetic construct
GTPGSARLK

SEQ ID NO: 52245 - protein, 9 aa, synthetic construct
GTPGSARVK

SEQ ID NO: 52246 - protein, 9 aa, synthetic construct
GTPGSAKVR

SEQ ID NO: 52247 - protein, 9 aa, synthetic construct
GTPGSIRLR

SEQ ID NO: 52248 - protein, 9 aa, synthetic construct
GTPGSIKLR

SEQ ID NO: 52249 - protein, 9 aa, synthetic construct
GTPGSGRLR

SEQ ID NO: 52250 - protein, 9 aa, synthetic construct
GTPGSGRLH

SEQ ID NO: 52251 - protein, 9 aa, synthetic construct
GTPGSGRVK

SEQ ID NO: 52252 - protein, 9 aa, synthetic construct
GTPGSGKLR

SEQ ID NO: 52253 - protein, 9 aa, synthetic construct
GTPGSGKLK

SEQ ID NO: 52254 - protein, 9 aa, synthetic construct
GTPGSGKVK

SEQ ID NO: 52255 - protein, 9 aa, synthetic construct
GTPGVVRLK

SEQ ID NO: 52256 - protein, 9 aa, synthetic construct
GTPGVVRVR

SEQ ID NO: 52257 - protein, 9 aa, synthetic construct
GTPGVVRVK

SEQ ID NO: 52258 - protein, 9 aa, synthetic construct
GTPGVVKLR

SEQ ID NO: 52259 - protein, 9 aa, synthetic construct
GTPGVVKLK

SEQ ID NO: 52260 - protein, 9 aa, synthetic construct
GTPGVVKVK

SEQ ID NO: 52261 - protein, 9 aa, synthetic construct
GTPGVLHLY

SEQ ID NO: 52262 - protein, 9 aa, synthetic construct
GTPGVLHLR

SEQ ID NO: 52263 - protein, 9 aa, synthetic construct
GTPGVLHLF

SEQ ID NO: 52264 - protein, 9 aa, synthetic construct
GTPGVLRLH

SEQ ID NO: 52265 - protein, 9 aa, synthetic construct
GTPGVLRLK

SEQ ID NO: 52266 - protein, 9 aa, synthetic construct
GTPGVLRLF

SEQ ID NO: 52267 - protein, 9 aa, synthetic construct
GTPGVLRVR

SEQ ID NO: 52268 - protein, 9 aa, synthetic construct
GTPGVLRVF

SEQ ID NO: 52269 - protein, 9 aa, synthetic construct
GTPGVLKLH

SEQ ID NO: 52270 - protein, 9 aa, synthetic construct
GTPGVARLK

SEQ ID NO: 52271 - protein, 9 aa, synthetic construct
GTPGVARVY

SEQ ID NO: 52272 - protein, 9 aa, synthetic construct
GTPGVARVH

SEQ ID NO: 52273 - protein, 9 aa, synthetic construct
GTPGVARVK

SEQ ID NO: 52274 - protein, 9 aa, synthetic construct
GTPGVAKLK

SEQ ID NO: 52275 - protein, 9 aa, synthetic construct
GTPGVAKVY

SEQ ID NO: 52276 - protein, 9 aa, synthetic construct
GTPGVAKVR

SEQ ID NO: 52277 - protein, 9 aa, synthetic construct
GTPGVAKVK

SEQ ID NO: 52278 - protein, 9 aa, synthetic construct
GTPGVIRLK

SEQ ID NO: 52279 - protein, 9 aa, synthetic construct
GTPGVIRLF

SEQ ID NO: 52280 - protein, 9 aa, synthetic construct
GTPGVIRVR

SEQ ID NO: 52281 - protein, 9 aa, synthetic construct
GTPGVIRVK

SEQ ID NO: 52282 - protein, 9 aa, synthetic construct
GTPGVIKLK

SEQ ID NO: 52283 - protein, 9 aa, synthetic construct
GTPGVGRLH

SEQ ID NO: 52284 - protein, 9 aa, synthetic construct
GTPGVGRVR

SEQ ID NO: 52285 - protein, 9 aa, synthetic construct
GTPGVGKLK

SEQ ID NO: 52286 - protein, 9 aa, synthetic construct
GTPGVGKVK

SEQ ID NO: 52287 - protein, 9 aa, synthetic construct
GTPGGVHVH

SEQ ID NO: 52288 - protein, 9 aa, synthetic construct
GTPGGVRVR

SEQ ID NO: 52289 - protein, 9 aa, synthetic construct
GTPGGVKLR

SEQ ID NO: 52290 - protein, 9 aa, synthetic construct
GTPGGVKVR

SEQ ID NO: 52291 - protein, 9 aa, synthetic construct
GTPGGLHLR

SEQ ID NO: 52292 - protein, 9 aa, synthetic construct
GTPGGLHLK

SEQ ID NO: 52293 - protein, 9 aa, synthetic construct
GTPGGLRLR

SEQ ID NO: 52294 - protein, 9 aa, synthetic construct
GTPGGLRLK

SEQ ID NO: 52295 - protein, 9 aa, synthetic construct
GTPGGLRVY

SEQ ID NO: 52296 - protein, 9 aa, synthetic construct
GTPGGLRVR

SEQ ID NO: 52297 - protein, 9 aa, synthetic construct
GTPGGLRVK

SEQ ID NO: 52298 - protein, 9 aa, synthetic construct
GTPGGLKLK

SEQ ID NO: 52299 - protein, 9 aa, synthetic construct
GTPGGARLR

SEQ ID NO: 52300 - protein, 9 aa, synthetic construct
GTPGGARVR

SEQ ID NO: 52301 - protein, 9 aa, synthetic construct
GTPGGARVK

SEQ ID NO: 52302 - protein, 9 aa, synthetic construct
GTPGGAKLR

SEQ ID NO: 52303 - protein, 9 aa, synthetic construct
GTPGGAKLK

SEQ ID NO: 52304 - protein, 9 aa, synthetic construct
GTPGGAKVK

SEQ ID NO: 52305 - protein, 9 aa, synthetic construct
GTPGGIRLR

SEQ ID NO: 52306 - protein, 9 aa, synthetic construct
GTPGGIKLK

SEQ ID NO: 52307 - protein, 9 aa, synthetic construct
GTPGGIKVK

SEQ ID NO: 52308 - protein, 9 aa, synthetic construct
GTPAAVRLR

SEQ ID NO: 52309 - protein, 9 aa, synthetic construct
GTPAALRLR

SEQ ID NO: 52310 - protein, 9 aa, synthetic construct
GTPAALRLK

SEQ ID NO: 52311 - protein, 9 aa, synthetic construct
GTPAALRVR

SEQ ID NO: 52312 - protein, 9 aa, synthetic construct
GTPAALKVR

SEQ ID NO: 52313 - protein, 9 aa, synthetic construct
GTPAAARVK

SEQ ID NO: 52314 - protein, 9 aa, synthetic construct
GTPAAAKLR

SEQ ID NO: 52315 - protein, 9 aa, synthetic construct
GTPAAGRLR

SEQ ID NO: 52316 - protein, 9 aa, synthetic construct
GTPATVRLR

SEQ ID NO: 52317 - protein, 9 aa, synthetic construct
GTPATVRVR

SEQ ID NO: 52318 - protein, 9 aa, synthetic construct
GTPATVKLK

SEQ ID NO: 52319 - protein, 9 aa, synthetic construct
GTPATLHLF

SEQ ID NO: 52320 - protein, 9 aa, synthetic construct
GTPATLKLR

SEQ ID NO: 52321 - protein, 9 aa, synthetic construct
GTPATLKVR

SEQ ID NO: 52322 - protein, 9 aa, synthetic construct
GTPATARVK

SEQ ID NO: 52323 - protein, 9 aa, synthetic construct
GTPATAKLK

SEQ ID NO: 52324 - protein, 9 aa, synthetic construct
GTPATIRLR

SEQ ID NO: 52325 - protein, 9 aa, synthetic construct
GTPATIRLK

SEQ ID NO: 52326 - protein, 9 aa, synthetic construct
GTPASVHLF

SEQ ID NO: 52327 - protein, 9 aa, synthetic construct
GTPASVHVH

SEQ ID NO: 52328 - protein, 9 aa, synthetic construct
GTPASVRLR

SEQ ID NO: 52329 - protein, 9 aa, synthetic construct
GTPASVRLK

SEQ ID NO: 52330 - protein, 9 aa, synthetic construct
GTPASLRLY

SEQ ID NO: 52331 - protein, 9 aa, synthetic construct
GTPASLRLR

SEQ ID NO: 52332 - protein, 9 aa, synthetic construct
GTPASLRLK

SEQ ID NO: 52333 - protein, 9 aa, synthetic construct
GTPASLRLF

SEQ ID NO: 52334 - protein, 9 aa, synthetic construct
GTPASLRVR

SEQ ID NO: 52335 - protein, 9 aa, synthetic construct
GTPASLKLR

SEQ ID NO: 52336 - protein, 9 aa, synthetic construct
GTPASLKLK

SEQ ID NO: 52337 - protein, 9 aa, synthetic construct
GTPASLKVR

SEQ ID NO: 52338 - protein, 9 aa, synthetic construct
GTPASLKVK

SEQ ID NO: 52339 - protein, 9 aa, synthetic construct
GTPASARLR

SEQ ID NO: 52340 - protein, 9 aa, synthetic construct
GTPASAKLK

SEQ ID NO: 52341 - protein, 9 aa, synthetic construct
GTPASIRLY

SEQ ID NO: 52342 - protein, 9 aa, synthetic construct
GTPASIRLR

SEQ ID NO: 52343 - protein, 9 aa, synthetic construct
GTPASIKLR

SEQ ID NO: 52344 - protein, 9 aa, synthetic construct
GTPASIKVR

SEQ ID NO: 52345 - protein, 9 aa, synthetic construct
GTPASGKLR

SEQ ID NO: 52346 - protein, 9 aa, synthetic construct
GTPASGKLK

SEQ ID NO: 52347 - protein, 9 aa, synthetic construct
GTPASGKVR

SEQ ID NO: 52348 - protein, 9 aa, synthetic construct
GTPAVVHLF

SEQ ID NO: 52349 - protein, 9 aa, synthetic construct
GTPAVLHLY

SEQ ID NO: 52350 - protein, 9 aa, synthetic construct
GTPAVLHLR

SEQ ID NO: 52351 - protein, 9 aa, synthetic construct
GTPAVLHLH

SEQ ID NO: 52352 - protein, 9 aa, synthetic construct
GTPAVLHLF

SEQ ID NO: 52353 - protein, 9 aa, synthetic construct
GTPAVLHVR

SEQ ID NO: 52354 - protein, 9 aa, synthetic construct
GTPAVLRLR

SEQ ID NO: 52355 - protein, 9 aa, synthetic construct
GTPAVLRLK

SEQ ID NO: 52356 - protein, 9 aa, synthetic construct
GTPAVLRVR

SEQ ID NO: 52357 - protein, 9 aa, synthetic construct
GTPAVLRVK

SEQ ID NO: 52358 - protein, 9 aa, synthetic construct
GTPAVLRVF

SEQ ID NO: 52359 - protein, 9 aa, synthetic construct
GTPAVARLR

SEQ ID NO: 52360 - protein, 9 aa, synthetic construct
GTPAVARVR

SEQ ID NO: 52361 - protein, 9 aa, synthetic construct
GTPAVARVK

SEQ ID NO: 52362 - protein, 9 aa, synthetic construct
GTPAVAKLR

SEQ ID NO: 52363 - protein, 9 aa, synthetic construct
GTPAVAKLK

SEQ ID NO: 52364 - protein, 9 aa, synthetic construct
GTPAVIKLH

SEQ ID NO: 52365 - protein, 9 aa, synthetic construct
GTPAVGRLR

SEQ ID NO: 52366 - protein, 9 aa, synthetic construct
GTPAGVHLY

SEQ ID NO: 52367 - protein, 9 aa, synthetic construct
GTPAGVHLR

SEQ ID NO: 52368 - protein, 9 aa, synthetic construct
GTPAGVHLH

SEQ ID NO: 52369 - protein, 9 aa, synthetic construct
GTPAGVHLK

SEQ ID NO: 52370 - protein, 9 aa, synthetic construct
GTPAGVHLF

SEQ ID NO: 52371 - protein, 9 aa, synthetic construct
GTPAGVHVR

SEQ ID NO: 52372 - protein, 9 aa, synthetic construct
GTPAGVHVH

SEQ ID NO: 52373 - protein, 9 aa, synthetic construct
GTPAGVRLY

SEQ ID NO: 52374 - protein, 9 aa, synthetic construct
GTPAGVRLR

SEQ ID NO: 52375 - protein, 9 aa, synthetic construct
GTPAGVRLH

SEQ ID NO: 52376 - protein, 9 aa, synthetic construct
GTPAGVRLK

SEQ ID NO: 52377 - protein, 9 aa, synthetic construct
GTPAGVRVR

SEQ ID NO: 52378 - protein, 9 aa, synthetic construct
GTPAGVKLR

SEQ ID NO: 52379 - protein, 9 aa, synthetic construct
GTPAGVKLK

SEQ ID NO: 52380 - protein, 9 aa, synthetic construct
GTPAGVKVR

SEQ ID NO: 52381 - protein, 9 aa, synthetic construct
GTPAGLHLY

SEQ ID NO: 52382 - protein, 9 aa, synthetic construct
GTPAGLHLR

SEQ ID NO: 52383 - protein, 9 aa, synthetic construct
GTPAGLHLH

SEQ ID NO: 52384 - protein, 9 aa, synthetic construct
GTPAGLHLK

SEQ ID NO: 52385 - protein, 9 aa, synthetic construct
GTPAGLHLF

SEQ ID NO: 52386 - protein, 9 aa, synthetic construct
GTPAGLHVY

SEQ ID NO: 52387 - protein, 9 aa, synthetic construct
GTPAGLHVR

SEQ ID NO: 52388 - protein, 9 aa, synthetic construct
GTPAGLHVH

SEQ ID NO: 52389 - protein, 9 aa, synthetic construct
GTPAGLHVK

SEQ ID NO: 52390 - protein, 9 aa, synthetic construct
GTPAGLHVF

SEQ ID NO: 52391 - protein, 9 aa, synthetic construct
GTPAGLRLY

SEQ ID NO: 52392 - protein, 9 aa, synthetic construct
GTPAGLRLR

SEQ ID NO: 52393 - protein, 9 aa, synthetic construct
GTPAGLRLH

SEQ ID NO: 52394 - protein, 9 aa, synthetic construct
GTPAGLRLK

SEQ ID NO: 52395 - protein, 9 aa, synthetic construct
GTPAGLRLF

SEQ ID NO: 52396 - protein, 9 aa, synthetic construct
GTPAGLRVY

SEQ ID NO: 52397 - protein, 9 aa, synthetic construct
GTPAGLRVR

SEQ ID NO: 52398 - protein, 9 aa, synthetic construct
GTPAGLRVH

SEQ ID NO: 52399 - protein, 9 aa, synthetic construct
GTPAGLRVK

SEQ ID NO: 52400 - protein, 9 aa, synthetic construct
GTPAGLKLY

SEQ ID NO: 52401 - protein, 9 aa, synthetic construct
GTPAGLKLR

SEQ ID NO: 52402 - protein, 9 aa, synthetic construct
GTPAGLKLH

SEQ ID NO: 52403 - protein, 9 aa, synthetic construct
GTPAGLKLK

SEQ ID NO: 52404 - protein, 9 aa, synthetic construct
GTPAGLKLF

SEQ ID NO: 52405 - protein, 9 aa, synthetic construct
GTPAGLKVR

SEQ ID NO: 52406 - protein, 9 aa, synthetic construct
GTPAGLKVK

SEQ ID NO: 52407 - protein, 9 aa, synthetic construct
GTPAGARLR

SEQ ID NO: 52408 - protein, 9 aa, synthetic construct
GTPAGARLK

SEQ ID NO: 52409 - protein, 9 aa, synthetic construct
GTPAGARVK

SEQ ID NO: 52410 - protein, 9 aa, synthetic construct
GTPAGAKLR

SEQ ID NO: 52411 - protein, 9 aa, synthetic construct
GTPAGAKLK

SEQ ID NO: 52412 - protein, 9 aa, synthetic construct
GTPAGAKVR

SEQ ID NO: 52413 - protein, 9 aa, synthetic construct
GTPAGIKLR

SEQ ID NO: 52414 - protein, 9 aa, synthetic construct
GTPAGIKLK

SEQ ID NO: 52415 - protein, 9 aa, synthetic construct
GTPAGIKVK

SEQ ID NO: 52416 - protein, 9 aa, synthetic construct
GTPAGGRLR

SEQ ID NO: 52417 - protein, 9 aa, synthetic construct
GTPAGGRLK

SEQ ID NO: 52418 - protein, 9 aa, synthetic construct
GTPAGGRVH

SEQ ID NO: 52419 - protein, 9 aa, synthetic construct
GTPAGGKLR

SEQ ID NO: 52420 - protein, 9 aa, synthetic construct
GTPAGGKLK

SEQ ID NO: 52421 - protein, 9 aa, synthetic construct
GSNGAVRLR

SEQ ID NO: 52422 - protein, 9 aa, synthetic construct
GSNGAVRLK

SEQ ID NO: 52423 - protein, 9 aa, synthetic construct
GSNGAVRVR

SEQ ID NO: 52424 - protein, 9 aa, synthetic construct
GSNGALRLR

SEQ ID NO: 52425 - protein, 9 aa, synthetic construct
GSNGALRLK

SEQ ID NO: 52426 - protein, 9 aa, synthetic construct
GSNGAAKLK

SEQ ID NO: 52427 - protein, 9 aa, synthetic construct
GSNGAIRVR

SEQ ID NO: 52428 - protein, 9 aa, synthetic construct
GSNGAGRLR

SEQ ID NO: 52429 - protein, 9 aa, synthetic construct
GSNGAGKLK

SEQ ID NO: 52430 - protein, 9 aa, synthetic construct
GSNGTVRVR

SEQ ID NO: 52431 - protein, 9 aa, synthetic construct
GSNGTLKLK

SEQ ID NO: 52432 - protein, 9 aa, synthetic construct
GSNGTLKVR

SEQ ID NO: 52433 - protein, 9 aa, synthetic construct
GSNGTARLR

SEQ ID NO: 52434 - protein, 9 aa, synthetic construct
GSNGTAKLK

SEQ ID NO: 52435 - protein, 9 aa, synthetic construct
GSNGTIRLY

SEQ ID NO: 52436 - protein, 9 aa, synthetic construct
GSNGTIRVR

SEQ ID NO: 52437 - protein, 9 aa, synthetic construct
GSNGTIKVK

SEQ ID NO: 52438 - protein, 9 aa, synthetic construct
GSNGSVHVH

SEQ ID NO: 52439 - protein, 9 aa, synthetic construct
GSNGSVRLR

SEQ ID NO: 52440 - protein, 9 aa, synthetic construct
GSNGSVRLK

SEQ ID NO: 52441 - protein, 9 aa, synthetic construct
GSNGSVRVR

SEQ ID NO: 52442 - protein, 9 aa, synthetic construct
GSNGSVKLR

SEQ ID NO: 52443 - protein, 9 aa, synthetic construct
GSNGSVKLK

SEQ ID NO: 52444 - protein, 9 aa, synthetic construct
GSNGSLRLR

SEQ ID NO: 52445 - protein, 9 aa, synthetic construct
GSNGSLRLH

SEQ ID NO: 52446 - protein, 9 aa, synthetic construct
GSNGSLRLF

SEQ ID NO: 52447 - protein, 9 aa, synthetic construct
GSNGSLRVY

SEQ ID NO: 52448 - protein, 9 aa, synthetic construct
GSNGSLRVH

SEQ ID NO: 52449 - protein, 9 aa, synthetic construct
GSNGSLRVK

SEQ ID NO: 52450 - protein, 9 aa, synthetic construct
GSNGSLKLK

SEQ ID NO: 52451 - protein, 9 aa, synthetic construct
GSNGSLKVR

SEQ ID NO: 52452 - protein, 9 aa, synthetic construct
GSNGSARLR

SEQ ID NO: 52453 - protein, 9 aa, synthetic construct
GSNGSARLK

SEQ ID NO: 52454 - protein, 9 aa, synthetic construct
GSNGSARVR

SEQ ID NO: 52455 - protein, 9 aa, synthetic construct
GSNGSARVK

SEQ ID NO: 52456 - protein, 9 aa, synthetic construct
GSNGSAKLR

SEQ ID NO: 52457 - protein, 9 aa, synthetic construct
GSNGSAKLK

SEQ ID NO: 52458 - protein, 9 aa, synthetic construct
GSNGSAKVR

SEQ ID NO: 52459 - protein, 9 aa, synthetic construct
GSNGSIRLR

SEQ ID NO: 52460 - protein, 9 aa, synthetic construct
GSNGSIRLK

SEQ ID NO: 52461 - protein, 9 aa, synthetic construct
GSNGSIRVK

SEQ ID NO: 52462 - protein, 9 aa, synthetic construct
GSNGSGRVR

SEQ ID NO: 52463 - protein, 9 aa, synthetic construct
GSNGSGRVK

SEQ ID NO: 52464 - protein, 9 aa, synthetic construct
GSNGSGKLK

SEQ ID NO: 52465 - protein, 9 aa, synthetic construct
GSNGSGKVR

SEQ ID NO: 52466 - protein, 9 aa, synthetic construct
GSNGVVRLR

SEQ ID NO: 52467 - protein, 9 aa, synthetic construct
GSNGVVKLK

SEQ ID NO: 52468 - protein, 9 aa, synthetic construct
GSNGVVKVK

SEQ ID NO: 52469 - protein, 9 aa, synthetic construct
GSNGVLRLK

SEQ ID NO: 52470 - protein, 9 aa, synthetic construct
GSNGVARLR

SEQ ID NO: 52471 - protein, 9 aa, synthetic construct
GSNGVARLK

SEQ ID NO: 52472 - protein, 9 aa, synthetic construct
GSNGVAKLR

SEQ ID NO: 52473 - protein, 9 aa, synthetic construct
GSNGVAKVK

SEQ ID NO: 52474 - protein, 9 aa, synthetic construct
GSNGVGRLR

SEQ ID NO: 52475 - protein, 9 aa, synthetic construct
GSNGGVHVH

SEQ ID NO: 52476 - protein, 9 aa, synthetic construct
GSNGGVRLK

SEQ ID NO: 52477 - protein, 9 aa, synthetic construct
GSNGGLHLR

SEQ ID NO: 52478 - protein, 9 aa, synthetic construct
GSNGGLHLK

SEQ ID NO: 52479 - protein, 9 aa, synthetic construct
GSNGGLHLF

SEQ ID NO: 52480 - protein, 9 aa, synthetic construct
GSNGGLRLR

SEQ ID NO: 52481 - protein, 9 aa, synthetic construct
GSNGGLRLH

SEQ ID NO: 52482 - protein, 9 aa, synthetic construct
GSNGGLRLK

SEQ ID NO: 52483 - protein, 9 aa, synthetic construct
GSNGGLRVY

SEQ ID NO: 52484 - protein, 9 aa, synthetic construct
GSNGGLRVR

SEQ ID NO: 52485 - protein, 9 aa, synthetic construct
GSNGGLRVK

SEQ ID NO: 52486 - protein, 9 aa, synthetic construct
GSNGGLKLR

SEQ ID NO: 52487 - protein, 9 aa, synthetic construct
GSNGGLKVK

SEQ ID NO: 52488 - protein, 9 aa, synthetic construct
GSNGGARLR

SEQ ID NO: 52489 - protein, 9 aa, synthetic construct
GSNGGARLK

SEQ ID NO: 52490 - protein, 9 aa, synthetic construct
GSNGGARVR

SEQ ID NO: 52491 - protein, 9 aa, synthetic construct
GSNGGARVK

SEQ ID NO: 52492 - protein, 9 aa, synthetic construct
GSNGGGKVR

SEQ ID NO: 52493 - protein, 9 aa, synthetic construct
GSNAAVRLR

SEQ ID NO: 52494 - protein, 9 aa, synthetic construct
GSNAAVRVR

SEQ ID NO: 52495 - protein, 9 aa, synthetic construct
GSNAALRLR

SEQ ID NO: 52496 - protein, 9 aa, synthetic construct
GSNAALKVR

SEQ ID NO: 52497 - protein, 9 aa, synthetic construct
GSNAAIRVK

SEQ ID NO: 52498 - protein, 9 aa, synthetic construct
GSNAAGKVK

SEQ ID NO: 52499 - protein, 9 aa, synthetic construct
GSNATVRVR

SEQ ID NO: 52500 - protein, 9 aa, synthetic construct
GSNATVRVK

SEQ ID NO: 52501 - protein, 9 aa, synthetic construct
GSNATVKVR

SEQ ID NO: 52502 - protein, 9 aa, synthetic construct
GSNATLHLH

SEQ ID NO: 52503 - protein, 9 aa, synthetic construct
GSNATLHVY

SEQ ID NO: 52504 - protein, 9 aa, synthetic construct
GSNATLRLR

SEQ ID NO: 52505 - protein, 9 aa, synthetic construct
GSNATLRVR

SEQ ID NO: 52506 - protein, 9 aa, synthetic construct
GSNATLRVK

SEQ ID NO: 52507 - protein, 9 aa, synthetic construct
GSNATLKVR

SEQ ID NO: 52508 - protein, 9 aa, synthetic construct
GSNATLKVK

SEQ ID NO: 52509 - protein, 9 aa, synthetic construct
GSNATARLR

SEQ ID NO: 52510 - protein, 9 aa, synthetic construct
GSNATIRLR

SEQ ID NO: 52511 - protein, 9 aa, synthetic construct
GSNATIRLK

SEQ ID NO: 52512 - protein, 9 aa, synthetic construct
GSNATIKVR

SEQ ID NO: 52513 - protein, 9 aa, synthetic construct
GSNATGRVK

SEQ ID NO: 52514 - protein, 9 aa, synthetic construct
GSNATGKLR

SEQ ID NO: 52515 - protein, 9 aa, synthetic construct
GSNATGKLK

SEQ ID NO: 52516 - protein, 9 aa, synthetic construct
GSNATGKVK

SEQ ID NO: 52517 - protein, 9 aa, synthetic construct
GSNASVHVH

SEQ ID NO: 52518 - protein, 9 aa, synthetic construct
GSNASVRLR

SEQ ID NO: 52519 - protein, 9 aa, synthetic construct
GSNASVRLK

SEQ ID NO: 52520 - protein, 9 aa, synthetic construct
GSNASLRLR

SEQ ID NO: 52521 - protein, 9 aa, synthetic construct
GSNASLRLK

SEQ ID NO: 52522 - protein, 9 aa, synthetic construct
GSNASLRVR

SEQ ID NO: 52523 - protein, 9 aa, synthetic construct
GSNASLRVK

SEQ ID NO: 52524 - protein, 9 aa, synthetic construct
GSNASLKLR

SEQ ID NO: 52525 - protein, 9 aa, synthetic construct
GSNASLKLK

SEQ ID NO: 52526 - protein, 9 aa, synthetic construct
GSNASLKVR

SEQ ID NO: 52527 - protein, 9 aa, synthetic construct
GSNASARLR

SEQ ID NO: 52528 - protein, 9 aa, synthetic construct
GSNASARLK

SEQ ID NO: 52529 - protein, 9 aa, synthetic construct
GSNASARVR

SEQ ID NO: 52530 - protein, 9 aa, synthetic construct
GSNASARVK

SEQ ID NO: 52531 - protein, 9 aa, synthetic construct
GSNASAKLK

SEQ ID NO: 52532 - protein, 9 aa, synthetic construct
GSNASIRLR

SEQ ID NO: 52533 - protein, 9 aa, synthetic construct
GSNASIRVK

SEQ ID NO: 52534 - protein, 9 aa, synthetic construct
GSNASIKLR

SEQ ID NO: 52535 - protein, 9 aa, synthetic construct
GSNASIKVK

SEQ ID NO: 52536 - protein, 9 aa, synthetic construct
GSNASGRVR

SEQ ID NO: 52537 - protein, 9 aa, synthetic construct
GSNASGKLR

SEQ ID NO: 52538 - protein, 9 aa, synthetic construct
GSNASGKVR

SEQ ID NO: 52539 - protein, 9 aa, synthetic construct
GSNAVVHLR

SEQ ID NO: 52540 - protein, 9 aa, synthetic construct
GSNAVVHLF

SEQ ID NO: 52541 - protein, 9 aa, synthetic construct
GSNAVVRLR

SEQ ID NO: 52542 - protein, 9 aa, synthetic construct
GSNAVVKVK

SEQ ID NO: 52543 - protein, 9 aa, synthetic construct
GSNAVLHLR

SEQ ID NO: 52544 - protein, 9 aa, synthetic construct
GSNAVLHLH

SEQ ID NO: 52545 - protein, 9 aa, synthetic construct
GSNAVLHLK

SEQ ID NO: 52546 - protein, 9 aa, synthetic construct
GSNAVLHLF

SEQ ID NO: 52547 - protein, 9 aa, synthetic construct
GSNAVLRLY

SEQ ID NO: 52548 - protein, 9 aa, synthetic construct
GSNAVLRLR

SEQ ID NO: 52549 - protein, 9 aa, synthetic construct
GSNAVLRLK

SEQ ID NO: 52550 - protein, 9 aa, synthetic construct
GSNAVLRVR

SEQ ID NO: 52551 - protein, 9 aa, synthetic construct
GSNAVLRVK

SEQ ID NO: 52552 - protein, 9 aa, synthetic construct
GSNAVLKLK

SEQ ID NO: 52553 - protein, 9 aa, synthetic construct
GSNAVARLY

SEQ ID NO: 52554 - protein, 9 aa, synthetic construct
GSNAVARLK

SEQ ID NO: 52555 - protein, 9 aa, synthetic construct
GSNAVARVY

SEQ ID NO: 52556 - protein, 9 aa, synthetic construct
GSNAVARVR

SEQ ID NO: 52557 - protein, 9 aa, synthetic construct
GSNAVARVH

SEQ ID NO: 52558 - protein, 9 aa, synthetic construct
GSNAVARVK

SEQ ID NO: 52559 - protein, 9 aa, synthetic construct
GSNAVAKLR

SEQ ID NO: 52560 - protein, 9 aa, synthetic construct
GSNAVAKVY

SEQ ID NO: 52561 - protein, 9 aa, synthetic construct
GSNAVIRLH

SEQ ID NO: 52562 - protein, 9 aa, synthetic construct
GSNAVIRLK

SEQ ID NO: 52563 - protein, 9 aa, synthetic construct
GSNAVIKLR

SEQ ID NO: 52564 - protein, 9 aa, synthetic construct
GSNAVGRLR

SEQ ID NO: 52565 - protein, 9 aa, synthetic construct
GSNAVGRLK

SEQ ID NO: 52566 - protein, 9 aa, synthetic construct
GSNAVGKLR

SEQ ID NO: 52567 - protein, 9 aa, synthetic construct
GSNAVGKVR

SEQ ID NO: 52568 - protein, 9 aa, synthetic construct
GSNAGVHLK

SEQ ID NO: 52569 - protein, 9 aa, synthetic construct
GSNAGVHVH

SEQ ID NO: 52570 - protein, 9 aa, synthetic construct
GSNAGVRLR

SEQ ID NO: 52571 - protein, 9 aa, synthetic construct
GSNAGVRLK

SEQ ID NO: 52572 - protein, 9 aa, synthetic construct
GSNAGLHLY

SEQ ID NO: 52573 - protein, 9 aa, synthetic construct
GSNAGLHLR

SEQ ID NO: 52574 - protein, 9 aa, synthetic construct
GSNAGLHLH

SEQ ID NO: 52575 - protein, 9 aa, synthetic construct
GSNAGLHLK

SEQ ID NO: 52576 - protein, 9 aa, synthetic construct
GSNAGLHVR

SEQ ID NO: 52577 - protein, 9 aa, synthetic construct
GSNAGLHVH

SEQ ID NO: 52578 - protein, 9 aa, synthetic construct
GSNAGLHVK

SEQ ID NO: 52579 - protein, 9 aa, synthetic construct
GSNAGLHVF

SEQ ID NO: 52580 - protein, 9 aa, synthetic construct
GSNAGLRLY

SEQ ID NO: 52581 - protein, 9 aa, synthetic construct
GSNAGLRLR

SEQ ID NO: 52582 - protein, 9 aa, synthetic construct
GSNAGLRLH

SEQ ID NO: 52583 - protein, 9 aa, synthetic construct
GSNAGLRLK

SEQ ID NO: 52584 - protein, 9 aa, synthetic construct
GSNAGLRLF

SEQ ID NO: 52585 - protein, 9 aa, synthetic construct
GSNAGLRVR

SEQ ID NO: 52586 - protein, 9 aa, synthetic construct
GSNAGLRVH

SEQ ID NO: 52587 - protein, 9 aa, synthetic construct
GSNAGLRVK

SEQ ID NO: 52588 - protein, 9 aa, synthetic construct
GSNAGLKLR

SEQ ID NO: 52589 - protein, 9 aa, synthetic construct
GSNAGLKLK

SEQ ID NO: 52590 - protein, 9 aa, synthetic construct
GSNAGLKVR

SEQ ID NO: 52591 - protein, 9 aa, synthetic construct
GSNAGLKVK

SEQ ID NO: 52592 - protein, 9 aa, synthetic construct
GSNAGARLR

SEQ ID NO: 52593 - protein, 9 aa, synthetic construct
GSNAGARVK

SEQ ID NO: 52594 - protein, 9 aa, synthetic construct
GSNAGAKLK

SEQ ID NO: 52595 - protein, 9 aa, synthetic construct
GSNAGAKVR

SEQ ID NO: 52596 - protein, 9 aa, synthetic construct
GSNAGAKVK

SEQ ID NO: 52597 - protein, 9 aa, synthetic construct
GSNAGIRLR

SEQ ID NO: 52598 - protein, 9 aa, synthetic construct
GSNAGIRLK

SEQ ID NO: 52599 - protein, 9 aa, synthetic construct
GSNAGIKLR

SEQ ID NO: 52600 - protein, 9 aa, synthetic construct
GSNAGIKVK

SEQ ID NO: 52601 - protein, 9 aa, synthetic construct
GSNAGGKLR

SEQ ID NO: 52602 - protein, 9 aa, synthetic construct
GSQGAVRLR

SEQ ID NO: 52603 - protein, 9 aa, synthetic construct
GSQGAVRLK

SEQ ID NO: 52604 - protein, 9 aa, synthetic construct
GSQGAVRVR

SEQ ID NO: 52605 - protein, 9 aa, synthetic construct
GSQGAVKVK

SEQ ID NO: 52606 - protein, 9 aa, synthetic construct
GSQGALRLR

SEQ ID NO: 52607 - protein, 9 aa, synthetic construct
GSQGALRVR

SEQ ID NO: 52608 - protein, 9 aa, synthetic construct
GSQGALKLK

SEQ ID NO: 52609 - protein, 9 aa, synthetic construct
GSQGAARLR

SEQ ID NO: 52610 - protein, 9 aa, synthetic construct
GSQGAAKLR

SEQ ID NO: 52611 - protein, 9 aa, synthetic construct
GSQGAAKLK

SEQ ID NO: 52612 - protein, 9 aa, synthetic construct
GSQGAIKLR

SEQ ID NO: 52613 - protein, 9 aa, synthetic construct
GSQGAIKVR

SEQ ID NO: 52614 - protein, 9 aa, synthetic construct
GSQGAGKLR

SEQ ID NO: 52615 - protein, 9 aa, synthetic construct
GSQGAGKVR

SEQ ID NO: 52616 - protein, 9 aa, synthetic construct
GSQGTVRLR

SEQ ID NO: 52617 - protein, 9 aa, synthetic construct
GSQGTVRLK

SEQ ID NO: 52618 - protein, 9 aa, synthetic construct
GSQGTVRVK

SEQ ID NO: 52619 - protein, 9 aa, synthetic construct
GSQGTLRLR

SEQ ID NO: 52620 - protein, 9 aa, synthetic construct
GSQGTLRLK

SEQ ID NO: 52621 - protein, 9 aa, synthetic construct
GSQGTLRVY

SEQ ID NO: 52622 - protein, 9 aa, synthetic construct
GSQGTLRVK

SEQ ID NO: 52623 - protein, 9 aa, synthetic construct
GSQGTLKLR

SEQ ID NO: 52624 - protein, 9 aa, synthetic construct
GSQGTLKLK

SEQ ID NO: 52625 - protein, 9 aa, synthetic construct
GSQGTARLR

SEQ ID NO: 52626 - protein, 9 aa, synthetic construct
GSQGTARLK

SEQ ID NO: 52627 - protein, 9 aa, synthetic construct
GSQGTARVR

SEQ ID NO: 52628 - protein, 9 aa, synthetic construct
GSQGTARVK

SEQ ID NO: 52629 - protein, 9 aa, synthetic construct
GSQGTAKLK

SEQ ID NO: 52630 - protein, 9 aa, synthetic construct
GSQGTIRLR

SEQ ID NO: 52631 - protein, 9 aa, synthetic construct
GSQGTIRLK

SEQ ID NO: 52632 - protein, 9 aa, synthetic construct
GSQGTIRVR

SEQ ID NO: 52633 - protein, 9 aa, synthetic construct
GSQGTIKVK

SEQ ID NO: 52634 - protein, 9 aa, synthetic construct
GSQGTGRVR

SEQ ID NO: 52635 - protein, 9 aa, synthetic construct
GSQGSVHVH

SEQ ID NO: 52636 - protein, 9 aa, synthetic construct
GSQGSVRLR

SEQ ID NO: 52637 - protein, 9 aa, synthetic construct
GSQGSVRLK

SEQ ID NO: 52638 - protein, 9 aa, synthetic construct
GSQGSVRVR

SEQ ID NO: 52639 - protein, 9 aa, synthetic construct
GSQGSVKLR

SEQ ID NO: 52640 - protein, 9 aa, synthetic construct
GSQGSVKLK

SEQ ID NO: 52641 - protein, 9 aa, synthetic construct
GSQGSVKVR

SEQ ID NO: 52642 - protein, 9 aa, synthetic construct
GSQGSLHLK

SEQ ID NO: 52643 - protein, 9 aa, synthetic construct
GSQGSLRLY

SEQ ID NO: 52644 - protein, 9 aa, synthetic construct
GSQGSLRLR

SEQ ID NO: 52645 - protein, 9 aa, synthetic construct
GSQGSLRLH

SEQ ID NO: 52646 - protein, 9 aa, synthetic construct
GSQGSLRLK

SEQ ID NO: 52647 - protein, 9 aa, synthetic construct
GSQGSLRVR

SEQ ID NO: 52648 - protein, 9 aa, synthetic construct
GSQGSLRVH

SEQ ID NO: 52649 - protein, 9 aa, synthetic construct
GSQGSLRVK

SEQ ID NO: 52650 - protein, 9 aa, synthetic construct
GSQGSLRVF

SEQ ID NO: 52651 - protein, 9 aa, synthetic construct
GSQGSLKLR

SEQ ID NO: 52652 - protein, 9 aa, synthetic construct
GSQGSLKLK

SEQ ID NO: 52653 - protein, 9 aa, synthetic construct
GSQGSLKVK

SEQ ID NO: 52654 - protein, 9 aa, synthetic construct
GSQGSARLR

SEQ ID NO: 52655 - protein, 9 aa, synthetic construct
GSQGSARLK

SEQ ID NO: 52656 - protein, 9 aa, synthetic construct
GSQGSARVR

SEQ ID NO: 52657 - protein, 9 aa, synthetic construct
GSQGSARVK

SEQ ID NO: 52658 - protein, 9 aa, synthetic construct
GSQGSAKLR

SEQ ID NO: 52659 - protein, 9 aa, synthetic construct
GSQGSAKLK

SEQ ID NO: 52660 - protein, 9 aa, synthetic construct
GSQGSAKVK

SEQ ID NO: 52661 - protein, 9 aa, synthetic construct
GSQGSIRLK

SEQ ID NO: 52662 - protein, 9 aa, synthetic construct
GSQGSIRVR

SEQ ID NO: 52663 - protein, 9 aa, synthetic construct
GSQGSIRVK

SEQ ID NO: 52664 - protein, 9 aa, synthetic construct
GSQGSGHVR

SEQ ID NO: 52665 - protein, 9 aa, synthetic construct
GSQGSGRVR

SEQ ID NO: 52666 - protein, 9 aa, synthetic construct
GSQGVVHLF

SEQ ID NO: 52667 - protein, 9 aa, synthetic construct
GSQGVVRLY

SEQ ID NO: 52668 - protein, 9 aa, synthetic construct
GSQGVVRLR

SEQ ID NO: 52669 - protein, 9 aa, synthetic construct
GSQGVVRVK

SEQ ID NO: 52670 - protein, 9 aa, synthetic construct
GSQGVLRLR

SEQ ID NO: 52671 - protein, 9 aa, synthetic construct
GSQGVLRLK

SEQ ID NO: 52672 - protein, 9 aa, synthetic construct
GSQGVLRVR

SEQ ID NO: 52673 - protein, 9 aa, synthetic construct
GSQGVARLY

SEQ ID NO: 52674 - protein, 9 aa, synthetic construct
GSQGVARLR

SEQ ID NO: 52675 - protein, 9 aa, synthetic construct
GSQGVARLH

SEQ ID NO: 52676 - protein, 9 aa, synthetic construct
GSQGVARLK

SEQ ID NO: 52677 - protein, 9 aa, synthetic construct
GSQGVARVK

SEQ ID NO: 52678 - protein, 9 aa, synthetic construct
GSQGVAKLR

SEQ ID NO: 52679 - protein, 9 aa, synthetic construct
GSQGVAKLK

SEQ ID NO: 52680 - protein, 9 aa, synthetic construct
GSQGVIRLK

SEQ ID NO: 52681 - protein, 9 aa, synthetic construct
GSQGVIRVR

SEQ ID NO: 52682 - protein, 9 aa, synthetic construct
GSQGGVHVH

SEQ ID NO: 52683 - protein, 9 aa, synthetic construct
GSQGGVRLR

SEQ ID NO: 52684 - protein, 9 aa, synthetic construct
GSQGGVRLK

SEQ ID NO: 52685 - protein, 9 aa, synthetic construct
GSQGGVKLR

SEQ ID NO: 52686 - protein, 9 aa, synthetic construct
GSQGGVKLK

SEQ ID NO: 52687 - protein, 9 aa, synthetic construct
GSQGGLHLY

SEQ ID NO: 52688 - protein, 9 aa, synthetic construct
GSQGGLHLR

SEQ ID NO: 52689 - protein, 9 aa, synthetic construct
GSQGGLHVF

SEQ ID NO: 52690 - protein, 9 aa, synthetic construct
GSQGGLRLY

SEQ ID NO: 52691 - protein, 9 aa, synthetic construct
GSQGGLRLR

SEQ ID NO: 52692 - protein, 9 aa, synthetic construct
GSQGGLRLK

SEQ ID NO: 52693 - protein, 9 aa, synthetic construct
GSQGGLRLF

SEQ ID NO: 52694 - protein, 9 aa, synthetic construct
GSQGGLRVY

SEQ ID NO: 52695 - protein, 9 aa, synthetic construct
GSQGGLRVH

SEQ ID NO: 52696 - protein, 9 aa, synthetic construct
GSQGGLKLR

SEQ ID NO: 52697 - protein, 9 aa, synthetic construct
GSQGGLKLK

SEQ ID NO: 52698 - protein, 9 aa, synthetic construct
GSQGGLKVK

SEQ ID NO: 52699 - protein, 9 aa, synthetic construct
GSQGGARLR

SEQ ID NO: 52700 - protein, 9 aa, synthetic construct
GSQGGARLK

SEQ ID NO: 52701 - protein, 9 aa, synthetic construct
GSQGGAKLR

SEQ ID NO: 52702 - protein, 9 aa, synthetic construct
GSQGGAKLK

SEQ ID NO: 52703 - protein, 9 aa, synthetic construct
GSQGGIRVK

SEQ ID NO: 52704 - protein, 9 aa, synthetic construct
GSQGGIKLR

SEQ ID NO: 52705 - protein, 9 aa, synthetic construct
GSQGGGHVK

SEQ ID NO: 52706 - protein, 9 aa, synthetic construct
GSQGGGKLK

SEQ ID NO: 52707 - protein, 9 aa, synthetic construct
GSQGGGKVR

SEQ ID NO: 52708 - protein, 9 aa, synthetic construct
GSQAAVRLR

SEQ ID NO: 52709 - protein, 9 aa, synthetic construct
GSQAAVRVR

SEQ ID NO: 52710 - protein, 9 aa, synthetic construct
GSQAALRLR

SEQ ID NO: 52711 - protein, 9 aa, synthetic construct
GSQAALRLK

SEQ ID NO: 52712 - protein, 9 aa, synthetic construct
GSQAALRVR

SEQ ID NO: 52713 - protein, 9 aa, synthetic construct
GSQAALRVK

SEQ ID NO: 52714 - protein, 9 aa, synthetic construct
GSQAALKLK

SEQ ID NO: 52715 - protein, 9 aa, synthetic construct
GSQAAARLK

SEQ ID NO: 52716 - protein, 9 aa, synthetic construct
GSQAAARVK

SEQ ID NO: 52717 - protein, 9 aa, synthetic construct
GSQAAAKLR

SEQ ID NO: 52718 - protein, 9 aa, synthetic construct
GSQAAIRLY

SEQ ID NO: 52719 - protein, 9 aa, synthetic construct
GSQAAIRLR

SEQ ID NO: 52720 - protein, 9 aa, synthetic construct
GSQAAIRLK

SEQ ID NO: 52721 - protein, 9 aa, synthetic construct
GSQAAIRVK

SEQ ID NO: 52722 - protein, 9 aa, synthetic construct
GSQAAIKVK

SEQ ID NO: 52723 - protein, 9 aa, synthetic construct
GSQAAGRLR

SEQ ID NO: 52724 - protein, 9 aa, synthetic construct
GSQAAGKLR

SEQ ID NO: 52725 - protein, 9 aa, synthetic construct
GSQAAGKVK

SEQ ID NO: 52726 - protein, 9 aa, synthetic construct
GSQATVRLR

SEQ ID NO: 52727 - protein, 9 aa, synthetic construct
GSQATVRLK

SEQ ID NO: 52728 - protein, 9 aa, synthetic construct
GSQATVRVR

SEQ ID NO: 52729 - protein, 9 aa, synthetic construct
GSQATVKLR

SEQ ID NO: 52730 - protein, 9 aa, synthetic construct
GSQATVKLK

SEQ ID NO: 52731 - protein, 9 aa, synthetic construct
GSQATVKVR

SEQ ID NO: 52732 - protein, 9 aa, synthetic construct
GSQATVKVK

SEQ ID NO: 52733 - protein, 9 aa, synthetic construct
GSQATLRLR

SEQ ID NO: 52734 - protein, 9 aa, synthetic construct
GSQATLRLK

SEQ ID NO: 52735 - protein, 9 aa, synthetic construct
GSQATLRVR

SEQ ID NO: 52736 - protein, 9 aa, synthetic construct
GSQATLRVH

SEQ ID NO: 52737 - protein, 9 aa, synthetic construct
GSQATLRVK

SEQ ID NO: 52738 - protein, 9 aa, synthetic construct
GSQATLKLR

SEQ ID NO: 52739 - protein, 9 aa, synthetic construct
GSQATLKLK

SEQ ID NO: 52740 - protein, 9 aa, synthetic construct
GSQATLKVR

SEQ ID NO: 52741 - protein, 9 aa, synthetic construct
GSQATLKVH

SEQ ID NO: 52742 - protein, 9 aa, synthetic construct
GSQATLKVK

SEQ ID NO: 52743 - protein, 9 aa, synthetic construct
GSQATARLR

SEQ ID NO: 52744 - protein, 9 aa, synthetic construct
GSQATARLK

SEQ ID NO: 52745 - protein, 9 aa, synthetic construct
GSQATARVK

SEQ ID NO: 52746 - protein, 9 aa, synthetic construct
GSQATAKLK

SEQ ID NO: 52747 - protein, 9 aa, synthetic construct
GSQATIRVY

SEQ ID NO: 52748 - protein, 9 aa, synthetic construct
GSQATIKLR

SEQ ID NO: 52749 - protein, 9 aa, synthetic construct
GSQATIKLK

SEQ ID NO: 52750 - protein, 9 aa, synthetic construct
GSQATIKVR

SEQ ID NO: 52751 - protein, 9 aa, synthetic construct
GSQATIKVK

SEQ ID NO: 52752 - protein, 9 aa, synthetic construct
GSQATGRLR

SEQ ID NO: 52753 - protein, 9 aa, synthetic construct
GSQATGRVR

SEQ ID NO: 52754 - protein, 9 aa, synthetic construct
GSQATGKLR

SEQ ID NO: 52755 - protein, 9 aa, synthetic construct
GSQATGKVR

SEQ ID NO: 52756 - protein, 9 aa, synthetic construct
GSQATGKVK

SEQ ID NO: 52757 - protein, 9 aa, synthetic construct
GSQASVHVH

SEQ ID NO: 52758 - protein, 9 aa, synthetic construct
GSQASVRLK

SEQ ID NO: 52759 - protein, 9 aa, synthetic construct
GSQASVRVR

SEQ ID NO: 52760 - protein, 9 aa, synthetic construct
GSQASVRVH

SEQ ID NO: 52761 - protein, 9 aa, synthetic construct
GSQASVRVK

SEQ ID NO: 52762 - protein, 9 aa, synthetic construct
GSQASVKLK

SEQ ID NO: 52763 - protein, 9 aa, synthetic construct
GSQASLHLR

SEQ ID NO: 52764 - protein, 9 aa, synthetic construct
GSQASLHVY

SEQ ID NO: 52765 - protein, 9 aa, synthetic construct
GSQASLHVH

SEQ ID NO: 52766 - protein, 9 aa, synthetic construct
GSQASLHVK

SEQ ID NO: 52767 - protein, 9 aa, synthetic construct
GSQASLHVF

SEQ ID NO: 52768 - protein, 9 aa, synthetic construct
GSQASLRLY

SEQ ID NO: 52769 - protein, 9 aa, synthetic construct
GSQASLRLR

SEQ ID NO: 52770 - protein, 9 aa, synthetic construct
GSQASLRLH

SEQ ID NO: 52771 - protein, 9 aa, synthetic construct
GSQASLRLK

SEQ ID NO: 52772 - protein, 9 aa, synthetic construct
GSQASLRLF

SEQ ID NO: 52773 - protein, 9 aa, synthetic construct
GSQASLRVY

SEQ ID NO: 52774 - protein, 9 aa, synthetic construct
GSQASLRVR

SEQ ID NO: 52775 - protein, 9 aa, synthetic construct
GSQASLRVH

SEQ ID NO: 52776 - protein, 9 aa, synthetic construct
GSQASLRVK

SEQ ID NO: 52777 - protein, 9 aa, synthetic construct
GSQASLRVF

SEQ ID NO: 52778 - protein, 9 aa, synthetic construct
GSQASLKLR

SEQ ID NO: 52779 - protein, 9 aa, synthetic construct
GSQASLKLH

SEQ ID NO: 52780 - protein, 9 aa, synthetic construct
GSQASLKLK

SEQ ID NO: 52781 - protein, 9 aa, synthetic construct
GSQASLKVY

SEQ ID NO: 52782 - protein, 9 aa, synthetic construct
GSQASLKVR

SEQ ID NO: 52783 - protein, 9 aa, synthetic construct
GSQASLKVH

SEQ ID NO: 52784 - protein, 9 aa, synthetic construct
GSQASLKVK

SEQ ID NO: 52785 - protein, 9 aa, synthetic construct
GSQASLKVF

SEQ ID NO: 52786 - protein, 9 aa, synthetic construct
GSQASARLR

SEQ ID NO: 52787 - protein, 9 aa, synthetic construct
GSQASARLH

SEQ ID NO: 52788 - protein, 9 aa, synthetic construct
GSQASAKLK

SEQ ID NO: 52789 - protein, 9 aa, synthetic construct
GSQASAKVR

SEQ ID NO: 52790 - protein, 9 aa, synthetic construct
GSQASAKVK

SEQ ID NO: 52791 - protein, 9 aa, synthetic construct
GSQASIRLR

SEQ ID NO: 52792 - protein, 9 aa, synthetic construct
GSQASIRVR

SEQ ID NO: 52793 - protein, 9 aa, synthetic construct
GSQASIRVK

SEQ ID NO: 52794 - protein, 9 aa, synthetic construct
GSQASIKVK

SEQ ID NO: 52795 - protein, 9 aa, synthetic construct
GSQASGRLK

SEQ ID NO: 52796 - protein, 9 aa, synthetic construct
GSQASGRVR

SEQ ID NO: 52797 - protein, 9 aa, synthetic construct
GSQASGKLK

SEQ ID NO: 52798 - protein, 9 aa, synthetic construct
GSQASGKVR

SEQ ID NO: 52799 - protein, 9 aa, synthetic construct
GSQAVVHVY

SEQ ID NO: 52800 - protein, 9 aa, synthetic construct
GSQAVVRLY

SEQ ID NO: 52801 - protein, 9 aa, synthetic construct
GSQAVVRLR

SEQ ID NO: 52802 - protein, 9 aa, synthetic construct
GSQAVVRLH

SEQ ID NO: 52803 - protein, 9 aa, synthetic construct
GSQAVVRLK

SEQ ID NO: 52804 - protein, 9 aa, synthetic construct
GSQAVVRVY

SEQ ID NO: 52805 - protein, 9 aa, synthetic construct
GSQAVVRVH

SEQ ID NO: 52806 - protein, 9 aa, synthetic construct
GSQAVVRVK

SEQ ID NO: 52807 - protein, 9 aa, synthetic construct
GSQAVVKLR

SEQ ID NO: 52808 - protein, 9 aa, synthetic construct
GSQAVVKLK

SEQ ID NO: 52809 - protein, 9 aa, synthetic construct
GSQAVVKVR

SEQ ID NO: 52810 - protein, 9 aa, synthetic construct
GSQAVLHLY

SEQ ID NO: 52811 - protein, 9 aa, synthetic construct
GSQAVLHLR

SEQ ID NO: 52812 - protein, 9 aa, synthetic construct
GSQAVLHLH

SEQ ID NO: 52813 - protein, 9 aa, synthetic construct
GSQAVLHLF

SEQ ID NO: 52814 - protein, 9 aa, synthetic construct
GSQAVLHVY

SEQ ID NO: 52815 - protein, 9 aa, synthetic construct
GSQAVLHVF

SEQ ID NO: 52816 - protein, 9 aa, synthetic construct
GSQAVLRLR

SEQ ID NO: 52817 - protein, 9 aa, synthetic construct
GSQAVLRLK

SEQ ID NO: 52818 - protein, 9 aa, synthetic construct
GSQAVLRLF

SEQ ID NO: 52819 - protein, 9 aa, synthetic construct
GSQAVLRVR

SEQ ID NO: 52820 - protein, 9 aa, synthetic construct
GSQAVLRVK

SEQ ID NO: 52821 - protein, 9 aa, synthetic construct
GSQAVLKLR

SEQ ID NO: 52822 - protein, 9 aa, synthetic construct
GSQAVARLY

SEQ ID NO: 52823 - protein, 9 aa, synthetic construct
GSQAVARLR

SEQ ID NO: 52824 - protein, 9 aa, synthetic construct
GSQAVARLH

SEQ ID NO: 52825 - protein, 9 aa, synthetic construct
GSQAVARLK

SEQ ID NO: 52826 - protein, 9 aa, synthetic construct
GSQAVARVR

SEQ ID NO: 52827 - protein, 9 aa, synthetic construct
GSQAVARVK

SEQ ID NO: 52828 - protein, 9 aa, synthetic construct
GSQAVAKLR

SEQ ID NO: 52829 - protein, 9 aa, synthetic construct
GSQAVAKLK

SEQ ID NO: 52830 - protein, 9 aa, synthetic construct
GSQAVIHLF

SEQ ID NO: 52831 - protein, 9 aa, synthetic construct
GSQAVIRLR

SEQ ID NO: 52832 - protein, 9 aa, synthetic construct
GSQAVIRVR

SEQ ID NO: 52833 - protein, 9 aa, synthetic construct
GSQAVIRVK

SEQ ID NO: 52834 - protein, 9 aa, synthetic construct
GSQAVIKLR

SEQ ID NO: 52835 - protein, 9 aa, synthetic construct
GSQAVIKLK

SEQ ID NO: 52836 - protein, 9 aa, synthetic construct
GSQAVGRLK

SEQ ID NO: 52837 - protein, 9 aa, synthetic construct
GSQAVGKVR

SEQ ID NO: 52838 - protein, 9 aa, synthetic construct
GSQAGVHLR

SEQ ID NO: 52839 - protein, 9 aa, synthetic construct
GSQAGVHLH

SEQ ID NO: 52840 - protein, 9 aa, synthetic construct
GSQAGVHVH

SEQ ID NO: 52841 - protein, 9 aa, synthetic construct
GSQAGVRLR

SEQ ID NO: 52842 - protein, 9 aa, synthetic construct
GSQAGVRLH

SEQ ID NO: 52843 - protein, 9 aa, synthetic construct
GSQAGVRLK

SEQ ID NO: 52844 - protein, 9 aa, synthetic construct
GSQAGVKLK

SEQ ID NO: 52845 - protein, 9 aa, synthetic construct
GSQAGVKVK

SEQ ID NO: 52846 - protein, 9 aa, synthetic construct
GSQAGLHLY

SEQ ID NO: 52847 - protein, 9 aa, synthetic construct
GSQAGLHLR

SEQ ID NO: 52848 - protein, 9 aa, synthetic construct
GSQAGLHLH

SEQ ID NO: 52849 - protein, 9 aa, synthetic construct
GSQAGLHLK

SEQ ID NO: 52850 - protein, 9 aa, synthetic construct
GSQAGLHLF

SEQ ID NO: 52851 - protein, 9 aa, synthetic construct
GSQAGLHVY

SEQ ID NO: 52852 - protein, 9 aa, synthetic construct
GSQAGLHVR

SEQ ID NO: 52853 - protein, 9 aa, synthetic construct
GSQAGLHVH

SEQ ID NO: 52854 - protein, 9 aa, synthetic construct
GSQAGLHVF

SEQ ID NO: 52855 - protein, 9 aa, synthetic construct
GSQAGLRLY

SEQ ID NO: 52856 - protein, 9 aa, synthetic construct
GSQAGLRLR

SEQ ID NO: 52857 - protein, 9 aa, synthetic construct
GSQAGLRLH

SEQ ID NO: 52858 - protein, 9 aa, synthetic construct
GSQAGLRLK

SEQ ID NO: 52859 - protein, 9 aa, synthetic construct
GSQAGLRLF

SEQ ID NO: 52860 - protein, 9 aa, synthetic construct
GSQAGLRVY

SEQ ID NO: 52861 - protein, 9 aa, synthetic construct
GSQAGLRVR

SEQ ID NO: 52862 - protein, 9 aa, synthetic construct
GSQAGLRVH

SEQ ID NO: 52863 - protein, 9 aa, synthetic construct
GSQAGLRVK

SEQ ID NO: 52864 - protein, 9 aa, synthetic construct
GSQAGLKLR

SEQ ID NO: 52865 - protein, 9 aa, synthetic construct
GSQAGLKLK

SEQ ID NO: 52866 - protein, 9 aa, synthetic construct
GSQAGLKVR

SEQ ID NO: 52867 - protein, 9 aa, synthetic construct
GSQAGLKVK

SEQ ID NO: 52868 - protein, 9 aa, synthetic construct
GSQAGARLK

SEQ ID NO: 52869 - protein, 9 aa, synthetic construct
GSQAGAKVR

SEQ ID NO: 52870 - protein, 9 aa, synthetic construct
GSQAGAKVK

SEQ ID NO: 52871 - protein, 9 aa, synthetic construct
GSQAGIHVF

SEQ ID NO: 52872 - protein, 9 aa, synthetic construct
GSQAGIRLK

SEQ ID NO: 52873 - protein, 9 aa, synthetic construct
GSQAGIRVK

SEQ ID NO: 52874 - protein, 9 aa, synthetic construct
GSQAGIKLK

SEQ ID NO: 52875 - protein, 9 aa, synthetic construct
GSQAGGHVR

SEQ ID NO: 52876 - protein, 9 aa, synthetic construct
GSQAGGRLR

SEQ ID NO: 52877 - protein, 9 aa, synthetic construct
GSQAGGRLK

SEQ ID NO: 52878 - protein, 9 aa, synthetic construct
GSQAGGKLK

SEQ ID NO: 52879 - protein, 9 aa, synthetic construct
GSQAGGKVR

SEQ ID NO: 52880 - protein, 9 aa, synthetic construct
GSPGAVRLR

SEQ ID NO: 52881 - protein, 9 aa, synthetic construct
GSPGAVKLK

SEQ ID NO: 52882 - protein, 9 aa, synthetic construct
GSPGALRLY

SEQ ID NO: 52883 - protein, 9 aa, synthetic construct
GSPGALRLR

SEQ ID NO: 52884 - protein, 9 aa, synthetic construct
GSPGALRLK

SEQ ID NO: 52885 - protein, 9 aa, synthetic construct
GSPGALRVR

SEQ ID NO: 52886 - protein, 9 aa, synthetic construct
GSPGALKLK

SEQ ID NO: 52887 - protein, 9 aa, synthetic construct
GSPGALKVR

SEQ ID NO: 52888 - protein, 9 aa, synthetic construct
GSPGAIRLK

SEQ ID NO: 52889 - protein, 9 aa, synthetic construct
GSPGAIKLR

SEQ ID NO: 52890 - protein, 9 aa, synthetic construct
GSPGAGRLR

SEQ ID NO: 52891 - protein, 9 aa, synthetic construct
GSPGAGRLH

SEQ ID NO: 52892 - protein, 9 aa, synthetic construct
GSPGAGRLK

SEQ ID NO: 52893 - protein, 9 aa, synthetic construct
GSPGAGKVR

SEQ ID NO: 52894 - protein, 9 aa, synthetic construct
GSPGTVRLK

SEQ ID NO: 52895 - protein, 9 aa, synthetic construct
GSPGTVRVK

SEQ ID NO: 52896 - protein, 9 aa, synthetic construct
GSPGTLRLY

SEQ ID NO: 52897 - protein, 9 aa, synthetic construct
GSPGTLRLR

SEQ ID NO: 52898 - protein, 9 aa, synthetic construct
GSPGTLRVH

SEQ ID NO: 52899 - protein, 9 aa, synthetic construct
GSPGTLRVF

SEQ ID NO: 52900 - protein, 9 aa, synthetic construct
GSPGTLKVR

SEQ ID NO: 52901 - protein, 9 aa, synthetic construct
GSPGTLKVK

SEQ ID NO: 52902 - protein, 9 aa, synthetic construct
GSPGTARLR

SEQ ID NO: 52903 - protein, 9 aa, synthetic construct
GSPGTARVK

SEQ ID NO: 52904 - protein, 9 aa, synthetic construct
GSPGTIKLK

SEQ ID NO: 52905 - protein, 9 aa, synthetic construct
GSPGTGRLK

SEQ ID NO: 52906 - protein, 9 aa, synthetic construct
GSPGSVHLH

SEQ ID NO: 52907 - protein, 9 aa, synthetic construct
GSPGSVHVH

SEQ ID NO: 52908 - protein, 9 aa, synthetic construct
GSPGSVRLK

SEQ ID NO: 52909 - protein, 9 aa, synthetic construct
GSPGSVRVK

SEQ ID NO: 52910 - protein, 9 aa, synthetic construct
GSPGSLRLR

SEQ ID NO: 52911 - protein, 9 aa, synthetic construct
GSPGSLRLH

SEQ ID NO: 52912 - protein, 9 aa, synthetic construct
GSPGSLRLK

SEQ ID NO: 52913 - protein, 9 aa, synthetic construct
GSPGSLRLF

SEQ ID NO: 52914 - protein, 9 aa, synthetic construct
GSPGSLRVR

SEQ ID NO: 52915 - protein, 9 aa, synthetic construct
GSPGSLRVK

SEQ ID NO: 52916 - protein, 9 aa, synthetic construct
GSPGSLKLR

SEQ ID NO: 52917 - protein, 9 aa, synthetic construct
GSPGSLKVR

SEQ ID NO: 52918 - protein, 9 aa, synthetic construct
GSPGSLKVK

SEQ ID NO: 52919 - protein, 9 aa, synthetic construct
GSPGSARLR

SEQ ID NO: 52920 - protein, 9 aa, synthetic construct
GSPGSARLK

SEQ ID NO: 52921 - protein, 9 aa, synthetic construct
GSPGSARVR

SEQ ID NO: 52922 - protein, 9 aa, synthetic construct
GSPGSARVK

SEQ ID NO: 52923 - protein, 9 aa, synthetic construct
GSPGSAKLR

SEQ ID NO: 52924 - protein, 9 aa, synthetic construct
GSPGSAKLK

SEQ ID NO: 52925 - protein, 9 aa, synthetic construct
GSPGSAKVR

SEQ ID NO: 52926 - protein, 9 aa, synthetic construct
GSPGSAKVK

SEQ ID NO: 52927 - protein, 9 aa, synthetic construct
GSPGSIRLR

SEQ ID NO: 52928 - protein, 9 aa, synthetic construct
GSPGSGHLR

SEQ ID NO: 52929 - protein, 9 aa, synthetic construct
GSPGSGRLR

SEQ ID NO: 52930 - protein, 9 aa, synthetic construct
GSPGSGRLK

SEQ ID NO: 52931 - protein, 9 aa, synthetic construct
GSPGSGRVR

SEQ ID NO: 52932 - protein, 9 aa, synthetic construct
GSPGSGKVR

SEQ ID NO: 52933 - protein, 9 aa, synthetic construct
GSPGVVHLR

SEQ ID NO: 52934 - protein, 9 aa, synthetic construct
GSPGVVHLF

SEQ ID NO: 52935 - protein, 9 aa, synthetic construct
GSPGVVRLF

SEQ ID NO: 52936 - protein, 9 aa, synthetic construct
GSPGVVRVR

SEQ ID NO: 52937 - protein, 9 aa, synthetic construct
GSPGVVKLK

SEQ ID NO: 52938 - protein, 9 aa, synthetic construct
GSPGVVKVR

SEQ ID NO: 52939 - protein, 9 aa, synthetic construct
GSPGVVKVK

SEQ ID NO: 52940 - protein, 9 aa, synthetic construct
GSPGVLHLY

SEQ ID NO: 52941 - protein, 9 aa, synthetic construct
GSPGVLHLF

SEQ ID NO: 52942 - protein, 9 aa, synthetic construct
GSPGVLRLR

SEQ ID NO: 52943 - protein, 9 aa, synthetic construct
GSPGVLRLH

SEQ ID NO: 52944 - protein, 9 aa, synthetic construct
GSPGVLRLF

SEQ ID NO: 52945 - protein, 9 aa, synthetic construct
GSPGVLKLK

SEQ ID NO: 52946 - protein, 9 aa, synthetic construct
GSPGVARLR

SEQ ID NO: 52947 - protein, 9 aa, synthetic construct
GSPGVARLK

SEQ ID NO: 52948 - protein, 9 aa, synthetic construct
GSPGVARVR

SEQ ID NO: 52949 - protein, 9 aa, synthetic construct
GSPGVARVK

SEQ ID NO: 52950 - protein, 9 aa, synthetic construct
GSPGVAKLR

SEQ ID NO: 52951 - protein, 9 aa, synthetic construct
GSPGVAKLK

SEQ ID NO: 52952 - protein, 9 aa, synthetic construct
GSPGVIKVR

SEQ ID NO: 52953 - protein, 9 aa, synthetic construct
GSPGVGRLH

SEQ ID NO: 52954 - protein, 9 aa, synthetic construct
GSPGVGRLK

SEQ ID NO: 52955 - protein, 9 aa, synthetic construct
GSPGVGRVR

SEQ ID NO: 52956 - protein, 9 aa, synthetic construct
GSPGVGKLR

SEQ ID NO: 52957 - protein, 9 aa, synthetic construct
GSPGVGKVK

SEQ ID NO: 52958 - protein, 9 aa, synthetic construct
GSPGGVHVH

SEQ ID NO: 52959 - protein, 9 aa, synthetic construct
GSPGGVRLR

SEQ ID NO: 52960 - protein, 9 aa, synthetic construct
GSPGGVRLK

SEQ ID NO: 52961 - protein, 9 aa, synthetic construct
GSPGGVRVR

SEQ ID NO: 52962 - protein, 9 aa, synthetic construct
GSPGGVRVK

SEQ ID NO: 52963 - protein, 9 aa, synthetic construct
GSPGGLHLY

SEQ ID NO: 52964 - protein, 9 aa, synthetic construct
GSPGGLHLR

SEQ ID NO: 52965 - protein, 9 aa, synthetic construct
GSPGGLHLK

SEQ ID NO: 52966 - protein, 9 aa, synthetic construct
GSPGGLRLR

SEQ ID NO: 52967 - protein, 9 aa, synthetic construct
GSPGGLRLK

SEQ ID NO: 52968 - protein, 9 aa, synthetic construct
GSPGGLRLF

SEQ ID NO: 52969 - protein, 9 aa, synthetic construct
GSPGGLRVK

SEQ ID NO: 52970 - protein, 9 aa, synthetic construct
GSPGGLRVF

SEQ ID NO: 52971 - protein, 9 aa, synthetic construct
GSPGGLKLR

SEQ ID NO: 52972 - protein, 9 aa, synthetic construct
GSPGGLKLK

SEQ ID NO: 52973 - protein, 9 aa, synthetic construct
GSPGGLKVR

SEQ ID NO: 52974 - protein, 9 aa, synthetic construct
GSPGGLKVK

SEQ ID NO: 52975 - protein, 9 aa, synthetic construct
GSPGGARLR

SEQ ID NO: 52976 - protein, 9 aa, synthetic construct
GSPGGARVK

SEQ ID NO: 52977 - protein, 9 aa, synthetic construct
GSPGGAKLR

SEQ ID NO: 52978 - protein, 9 aa, synthetic construct
GSPGGAKLK

SEQ ID NO: 52979 - protein, 9 aa, synthetic construct
GSPGGIKLK

SEQ ID NO: 52980 - protein, 9 aa, synthetic construct
GSPGGGHLR

SEQ ID NO: 52981 - protein, 9 aa, synthetic construct
GSPGGGRLR

SEQ ID NO: 52982 - protein, 9 aa, synthetic construct
GSPAAVRVR

SEQ ID NO: 52983 - protein, 9 aa, synthetic construct
GSPAAVKVR

SEQ ID NO: 52984 - protein, 9 aa, synthetic construct
GSPAALHLY

SEQ ID NO: 52985 - protein, 9 aa, synthetic construct
GSPAALRLR

SEQ ID NO: 52986 - protein, 9 aa, synthetic construct
GSPAALRLK

SEQ ID NO: 52987 - protein, 9 aa, synthetic construct
GSPAALRVY

SEQ ID NO: 52988 - protein, 9 aa, synthetic construct
GSPAALKVR

SEQ ID NO: 52989 - protein, 9 aa, synthetic construct
GSPAAGRLR

SEQ ID NO: 52990 - protein, 9 aa, synthetic construct
GSPATVKVR

SEQ ID NO: 52991 - protein, 9 aa, synthetic construct
GSPATLRVR

SEQ ID NO: 52992 - protein, 9 aa, synthetic construct
GSPATLKVR

SEQ ID NO: 52993 - protein, 9 aa, synthetic construct
GSPATARLR

SEQ ID NO: 52994 - protein, 9 aa, synthetic construct
GSPATIKLK

SEQ ID NO: 52995 - protein, 9 aa, synthetic construct
GSPATIKVK

SEQ ID NO: 52996 - protein, 9 aa, synthetic construct
GSPATGRLR

SEQ ID NO: 52997 - protein, 9 aa, synthetic construct
GSPATGRLK

SEQ ID NO: 52998 - protein, 9 aa, synthetic construct
GSPASVHVH

SEQ ID NO: 52999 - protein, 9 aa, synthetic construct
GSPASVRLR

SEQ ID NO: 53000 - protein, 9 aa, synthetic construct
GSPASVRLK

SEQ ID NO: 53001 - protein, 9 aa, synthetic construct
GSPASVRVR

SEQ ID NO: 53002 - protein, 9 aa, synthetic construct
GSPASVRVK

SEQ ID NO: 53003 - protein, 9 aa, synthetic construct
GSPASVKLK

SEQ ID NO: 53004 - protein, 9 aa, synthetic construct
GSPASVKVR

SEQ ID NO: 53005 - protein, 9 aa, synthetic construct
GSPASLRLY

SEQ ID NO: 53006 - protein, 9 aa, synthetic construct
GSPASLRLR

SEQ ID NO: 53007 - protein, 9 aa, synthetic construct
GSPASLRLK

SEQ ID NO: 53008 - protein, 9 aa, synthetic construct
GSPASLRLF

SEQ ID NO: 53009 - protein, 9 aa, synthetic construct
GSPASLRVY

SEQ ID NO: 53010 - protein, 9 aa, synthetic construct
GSPASLRVR

SEQ ID NO: 53011 - protein, 9 aa, synthetic construct
GSPASLRVK

SEQ ID NO: 53012 - protein, 9 aa, synthetic construct
GSPASLRVF

SEQ ID NO: 53013 - protein, 9 aa, synthetic construct
GSPASLKLR

SEQ ID NO: 53014 - protein, 9 aa, synthetic construct
GSPASLKLH

SEQ ID NO: 53015 - protein, 9 aa, synthetic construct
GSPASLKLK

SEQ ID NO: 53016 - protein, 9 aa, synthetic construct
GSPASLKVH

SEQ ID NO: 53017 - protein, 9 aa, synthetic construct
GSPASLKVK

SEQ ID NO: 53018 - protein, 9 aa, synthetic construct
GSPASLKVF

SEQ ID NO: 53019 - protein, 9 aa, synthetic construct
GSPASARLR

SEQ ID NO: 53020 - protein, 9 aa, synthetic construct
GSPASARLK

SEQ ID NO: 53021 - protein, 9 aa, synthetic construct
GSPASAKLR

SEQ ID NO: 53022 - protein, 9 aa, synthetic construct
GSPASAKLK

SEQ ID NO: 53023 - protein, 9 aa, synthetic construct
GSPASAKVR

SEQ ID NO: 53024 - protein, 9 aa, synthetic construct
GSPASIHLH

SEQ ID NO: 53025 - protein, 9 aa, synthetic construct
GSPASIRLY

SEQ ID NO: 53026 - protein, 9 aa, synthetic construct
GSPASIRLR

SEQ ID NO: 53027 - protein, 9 aa, synthetic construct
GSPASIRLK

SEQ ID NO: 53028 - protein, 9 aa, synthetic construct
GSPASIRVR

SEQ ID NO: 53029 - protein, 9 aa, synthetic construct
GSPASGRLR

SEQ ID NO: 53030 - protein, 9 aa, synthetic construct
GSPASGRVR

SEQ ID NO: 53031 - protein, 9 aa, synthetic construct
GSPASGKLR

SEQ ID NO: 53032 - protein, 9 aa, synthetic construct
GSPASGKLK

SEQ ID NO: 53033 - protein, 9 aa, synthetic construct
GSPAVVHLR

SEQ ID NO: 53034 - protein, 9 aa, synthetic construct
GSPAVVRLK

SEQ ID NO: 53035 - protein, 9 aa, synthetic construct
GSPAVVRVY

SEQ ID NO: 53036 - protein, 9 aa, synthetic construct
GSPAVVRVK

SEQ ID NO: 53037 - protein, 9 aa, synthetic construct
GSPAVLHLY

SEQ ID NO: 53038 - protein, 9 aa, synthetic construct
GSPAVLHLR

SEQ ID NO: 53039 - protein, 9 aa, synthetic construct
GSPAVLHLH

SEQ ID NO: 53040 - protein, 9 aa, synthetic construct
GSPAVLHLK

SEQ ID NO: 53041 - protein, 9 aa, synthetic construct
GSPAVLHLF

SEQ ID NO: 53042 - protein, 9 aa, synthetic construct
GSPAVLHVR

SEQ ID NO: 53043 - protein, 9 aa, synthetic construct
GSPAVLHVK

SEQ ID NO: 53044 - protein, 9 aa, synthetic construct
GSPAVLHVF

SEQ ID NO: 53045 - protein, 9 aa, synthetic construct
GSPAVLRLY

SEQ ID NO: 53046 - protein, 9 aa, synthetic construct
GSPAVLRLR

SEQ ID NO: 53047 - protein, 9 aa, synthetic construct
GSPAVLRLK

SEQ ID NO: 53048 - protein, 9 aa, synthetic construct
GSPAVLRVY

SEQ ID NO: 53049 - protein, 9 aa, synthetic construct
GSPAVLRVF

SEQ ID NO: 53050 - protein, 9 aa, synthetic construct
GSPAVLKLR

SEQ ID NO: 53051 - protein, 9 aa, synthetic construct
GSPAVARLR

SEQ ID NO: 53052 - protein, 9 aa, synthetic construct
GSPAVARLK

SEQ ID NO: 53053 - protein, 9 aa, synthetic construct
GSPAVARVR

SEQ ID NO: 53054 - protein, 9 aa, synthetic construct
GSPAVARVK

SEQ ID NO: 53055 - protein, 9 aa, synthetic construct
GSPAVAKLR

SEQ ID NO: 53056 - protein, 9 aa, synthetic construct
GSPAVAKLK

SEQ ID NO: 53057 - protein, 9 aa, synthetic construct
GSPAVAKVK

SEQ ID NO: 53058 - protein, 9 aa, synthetic construct
GSPAVIRLF

SEQ ID NO: 53059 - protein, 9 aa, synthetic construct
GSPAVIKLR

SEQ ID NO: 53060 - protein, 9 aa, synthetic construct
GSPAVGHLY

SEQ ID NO: 53061 - protein, 9 aa, synthetic construct
GSPAVGRLK

SEQ ID NO: 53062 - protein, 9 aa, synthetic construct
GSPAGVHLY

SEQ ID NO: 53063 - protein, 9 aa, synthetic construct
GSPAGVHLR

SEQ ID NO: 53064 - protein, 9 aa, synthetic construct
GSPAGVHLH

SEQ ID NO: 53065 - protein, 9 aa, synthetic construct
GSPAGVHLF

SEQ ID NO: 53066 - protein, 9 aa, synthetic construct
GSPAGVHVH

SEQ ID NO: 53067 - protein, 9 aa, synthetic construct
GSPAGVRLR

SEQ ID NO: 53068 - protein, 9 aa, synthetic construct
GSPAGVRLH

SEQ ID NO: 53069 - protein, 9 aa, synthetic construct
GSPAGVRLK

SEQ ID NO: 53070 - protein, 9 aa, synthetic construct
GSPAGVRVR

SEQ ID NO: 53071 - protein, 9 aa, synthetic construct
GSPAGVKLK

SEQ ID NO: 53072 - protein, 9 aa, synthetic construct
GSPAGVKVR

SEQ ID NO: 53073 - protein, 9 aa, synthetic construct
GSPAGLHLY

SEQ ID NO: 53074 - protein, 9 aa, synthetic construct
GSPAGLHLR

SEQ ID NO: 53075 - protein, 9 aa, synthetic construct
GSPAGLHLH

SEQ ID NO: 53076 - protein, 9 aa, synthetic construct
GSPAGLHLK

SEQ ID NO: 53077 - protein, 9 aa, synthetic construct
GSPAGLHLF

SEQ ID NO: 53078 - protein, 9 aa, synthetic construct
GSPAGLHVK

SEQ ID NO: 53079 - protein, 9 aa, synthetic construct
GSPAGLHVF

SEQ ID NO: 53080 - protein, 9 aa, synthetic construct
GSPAGLRLR

SEQ ID NO: 53081 - protein, 9 aa, synthetic construct
GSPAGLRLH

SEQ ID NO: 53082 - protein, 9 aa, synthetic construct
GSPAGLRLK

SEQ ID NO: 53083 - protein, 9 aa, synthetic construct
GSPAGLRLF

SEQ ID NO: 53084 - protein, 9 aa, synthetic construct
GSPAGLRVR

SEQ ID NO: 53085 - protein, 9 aa, synthetic construct
GSPAGLKLY

SEQ ID NO: 53086 - protein, 9 aa, synthetic construct
GSPAGLKLR

SEQ ID NO: 53087 - protein, 9 aa, synthetic construct
GSPAGLKVR

SEQ ID NO: 53088 - protein, 9 aa, synthetic construct
GSPAGLKVK

SEQ ID NO: 53089 - protein, 9 aa, synthetic construct
GSPAGARLR

SEQ ID NO: 53090 - protein, 9 aa, synthetic construct
GSPAGARLK

SEQ ID NO: 53091 - protein, 9 aa, synthetic construct
GSPAGAKLK

SEQ ID NO: 53092 - protein, 9 aa, synthetic construct
GSPAGAKVR

SEQ ID NO: 53093 - protein, 9 aa, synthetic construct
GSPAGIRLR

SEQ ID NO: 53094 - protein, 9 aa, synthetic construct
GSPAGIRVK

SEQ ID NO: 53095 - protein, 9 aa, synthetic construct
GSPAGIKLK

SEQ ID NO: 53096 - protein, 9 aa, synthetic construct
GSPAGGRLR

SEQ ID NO: 53097 - protein, 9 aa, synthetic construct
GSPAGGRLH

SEQ ID NO: 53098 - protein, 9 aa, synthetic construct
GSPAGGRLK

SEQ ID NO: 53099 - protein, 9 aa, synthetic construct
GSPAGGRVK

SEQ ID NO: 53100 - protein, 9 aa, synthetic construct
GSPAGGKLR

SEQ ID NO: 53101 - protein, 9 aa, synthetic construct
GSPAGGKLK

SEQ ID NO: 53102 - protein, 9 aa, synthetic construct
GANGAVHLR

SEQ ID NO: 53103 - protein, 9 aa, synthetic construct
GANGAVHLK

SEQ ID NO: 53104 - protein, 9 aa, synthetic construct
GANGAVHLF

SEQ ID NO: 53105 - protein, 9 aa, synthetic construct
GANGAVRLR

SEQ ID NO: 53106 - protein, 9 aa, synthetic construct
GANGAVRLK

SEQ ID NO: 53107 - protein, 9 aa, synthetic construct
GANGAVRLF

SEQ ID NO: 53108 - protein, 9 aa, synthetic construct
GANGAVRVY

SEQ ID NO: 53109 - protein, 9 aa, synthetic construct
GANGAVRVR

SEQ ID NO: 53110 - protein, 9 aa, synthetic construct
GANGAVKLR

SEQ ID NO: 53111 - protein, 9 aa, synthetic construct
GANGAVKLK

SEQ ID NO: 53112 - protein, 9 aa, synthetic construct
GANGAVKVY

SEQ ID NO: 53113 - protein, 9 aa, synthetic construct
GANGAVKVR

SEQ ID NO: 53114 - protein, 9 aa, synthetic construct
GANGAVKVH

SEQ ID NO: 53115 - protein, 9 aa, synthetic construct
GANGAVKVK

SEQ ID NO: 53116 - protein, 9 aa, synthetic construct
GANGAVKVF

SEQ ID NO: 53117 - protein, 9 aa, synthetic construct
GANGALHLR

SEQ ID NO: 53118 - protein, 9 aa, synthetic construct
GANGALHLH

SEQ ID NO: 53119 - protein, 9 aa, synthetic construct
GANGALHLF

SEQ ID NO: 53120 - protein, 9 aa, synthetic construct
GANGALHVR

SEQ ID NO: 53121 - protein, 9 aa, synthetic construct
GANGALHVK

SEQ ID NO: 53122 - protein, 9 aa, synthetic construct
GANGALHVF

SEQ ID NO: 53123 - protein, 9 aa, synthetic construct
GANGALRLY

SEQ ID NO: 53124 - protein, 9 aa, synthetic construct
GANGALRLR

SEQ ID NO: 53125 - protein, 9 aa, synthetic construct
GANGALRLK

SEQ ID NO: 53126 - protein, 9 aa, synthetic construct
GANGALRVY

SEQ ID NO: 53127 - protein, 9 aa, synthetic construct
GANGALRVR

SEQ ID NO: 53128 - protein, 9 aa, synthetic construct
GANGALRVH

SEQ ID NO: 53129 - protein, 9 aa, synthetic construct
GANGALRVF

SEQ ID NO: 53130 - protein, 9 aa, synthetic construct
GANGALKLH

SEQ ID NO: 53131 - protein, 9 aa, synthetic construct
GANGALKLK

SEQ ID NO: 53132 - protein, 9 aa, synthetic construct
GANGALKVY

SEQ ID NO: 53133 - protein, 9 aa, synthetic construct
GANGALKVR

SEQ ID NO: 53134 - protein, 9 aa, synthetic construct
GANGALKVK

SEQ ID NO: 53135 - protein, 9 aa, synthetic construct
GANGALKVF

SEQ ID NO: 53136 - protein, 9 aa, synthetic construct
GANGAAHLH

SEQ ID NO: 53137 - protein, 9 aa, synthetic construct
GANGAAHLK

SEQ ID NO: 53138 - protein, 9 aa, synthetic construct
GANGAAHVY

SEQ ID NO: 53139 - protein, 9 aa, synthetic construct
GANGAARLR

SEQ ID NO: 53140 - protein, 9 aa, synthetic construct
GANGAARLK

SEQ ID NO: 53141 - protein, 9 aa, synthetic construct
GANGAARLF

SEQ ID NO: 53142 - protein, 9 aa, synthetic construct
GANGAARVY

SEQ ID NO: 53143 - protein, 9 aa, synthetic construct
GANGAARVR

SEQ ID NO: 53144 - protein, 9 aa, synthetic construct
GANGAARVH

SEQ ID NO: 53145 - protein, 9 aa, synthetic construct
GANGAARVK

SEQ ID NO: 53146 - protein, 9 aa, synthetic construct
GANGAARVF

SEQ ID NO: 53147 - protein, 9 aa, synthetic construct
GANGAAKLY

SEQ ID NO: 53148 - protein, 9 aa, synthetic construct
GANGAAKLR

SEQ ID NO: 53149 - protein, 9 aa, synthetic construct
GANGAAKLH

SEQ ID NO: 53150 - protein, 9 aa, synthetic construct
GANGAAKLK

SEQ ID NO: 53151 - protein, 9 aa, synthetic construct
GANGAAKLF

SEQ ID NO: 53152 - protein, 9 aa, synthetic construct
GANGAAKVY

SEQ ID NO: 53153 - protein, 9 aa, synthetic construct
GANGAAKVR

SEQ ID NO: 53154 - protein, 9 aa, synthetic construct
GANGAAKVH

SEQ ID NO: 53155 - protein, 9 aa, synthetic construct
GANGAAKVK

SEQ ID NO: 53156 - protein, 9 aa, synthetic construct
GANGAAKVF

SEQ ID NO: 53157 - protein, 9 aa, synthetic construct
GANGAIHLR

SEQ ID NO: 53158 - protein, 9 aa, synthetic construct
GANGAIHLK

SEQ ID NO: 53159 - protein, 9 aa, synthetic construct
GANGAIHLF

SEQ ID NO: 53160 - protein, 9 aa, synthetic construct
GANGAIHVR

SEQ ID NO: 53161 - protein, 9 aa, synthetic construct
GANGAIRLY

SEQ ID NO: 53162 - protein, 9 aa, synthetic construct
GANGAIRLR

SEQ ID NO: 53163 - protein, 9 aa, synthetic construct
GANGAIRLF

SEQ ID NO: 53164 - protein, 9 aa, synthetic construct
GANGAIRVR

SEQ ID NO: 53165 - protein, 9 aa, synthetic construct
GANGAIRVK

SEQ ID NO: 53166 - protein, 9 aa, synthetic construct
GANGAIRVF

SEQ ID NO: 53167 - protein, 9 aa, synthetic construct
GANGAIKLR

SEQ ID NO: 53168 - protein, 9 aa, synthetic construct
GANGAIKVR

SEQ ID NO: 53169 - protein, 9 aa, synthetic construct
GANGAIKVK

SEQ ID NO: 53170 - protein, 9 aa, synthetic construct
GANGAIKVF

SEQ ID NO: 53171 - protein, 9 aa, synthetic construct
GANGAGHLR

SEQ ID NO: 53172 - protein, 9 aa, synthetic construct
GANGAGHVY

SEQ ID NO: 53173 - protein, 9 aa, synthetic construct
GANGAGRLY

SEQ ID NO: 53174 - protein, 9 aa, synthetic construct
GANGAGRLR

SEQ ID NO: 53175 - protein, 9 aa, synthetic construct
GANGAGRLK

SEQ ID NO: 53176 - protein, 9 aa, synthetic construct
GANGAGRVR

SEQ ID NO: 53177 - protein, 9 aa, synthetic construct
GANGAGRVK

SEQ ID NO: 53178 - protein, 9 aa, synthetic construct
GANGAGKLR

SEQ ID NO: 53179 - protein, 9 aa, synthetic construct
GANGAGKLK

SEQ ID NO: 53180 - protein, 9 aa, synthetic construct
GANGAGKLF

SEQ ID NO: 53181 - protein, 9 aa, synthetic construct
GANGAGKVR

SEQ ID NO: 53182 - protein, 9 aa, synthetic construct
GANGAGKVH

SEQ ID NO: 53183 - protein, 9 aa, synthetic construct
GANGAGKVK

SEQ ID NO: 53184 - protein, 9 aa, synthetic construct
GANGTVRLR

SEQ ID NO: 53185 - protein, 9 aa, synthetic construct
GANGTVRLK

SEQ ID NO: 53186 - protein, 9 aa, synthetic construct
GANGTVRVR

SEQ ID NO: 53187 - protein, 9 aa, synthetic construct
GANGTVKLR

SEQ ID NO: 53188 - protein, 9 aa, synthetic construct
GANGTVKLK

SEQ ID NO: 53189 - protein, 9 aa, synthetic construct
GANGTVKVR

SEQ ID NO: 53190 - protein, 9 aa, synthetic construct
GANGTLRLR

SEQ ID NO: 53191 - protein, 9 aa, synthetic construct
GANGTLKLR

SEQ ID NO: 53192 - protein, 9 aa, synthetic construct
GANGTLKLK

SEQ ID NO: 53193 - protein, 9 aa, synthetic construct
GANGTAKLK

SEQ ID NO: 53194 - protein, 9 aa, synthetic construct
GANGTIRLR

SEQ ID NO: 53195 - protein, 9 aa, synthetic construct
GANGTIRLK

SEQ ID NO: 53196 - protein, 9 aa, synthetic construct
GANGTIKVK

SEQ ID NO: 53197 - protein, 9 aa, synthetic construct
GANGTGRVR

SEQ ID NO: 53198 - protein, 9 aa, synthetic construct
GANGTGKLR

SEQ ID NO: 53199 - protein, 9 aa, synthetic construct
GANGSVHVH

SEQ ID NO: 53200 - protein, 9 aa, synthetic construct
GANGSVRLR

SEQ ID NO: 53201 - protein, 9 aa, synthetic construct
GANGSVRLK

SEQ ID NO: 53202 - protein, 9 aa, synthetic construct
GANGSVRVR

SEQ ID NO: 53203 - protein, 9 aa, synthetic construct
GANGSVKLR

SEQ ID NO: 53204 - protein, 9 aa, synthetic construct
GANGSVKLK

SEQ ID NO: 53205 - protein, 9 aa, synthetic construct
GANGSVKVR

SEQ ID NO: 53206 - protein, 9 aa, synthetic construct
GANGSLHLY

SEQ ID NO: 53207 - protein, 9 aa, synthetic construct
GANGSLRLR

SEQ ID NO: 53208 - protein, 9 aa, synthetic construct
GANGSLRLK

SEQ ID NO: 53209 - protein, 9 aa, synthetic construct
GANGSLRVY

SEQ ID NO: 53210 - protein, 9 aa, synthetic construct
GANGSLRVR

SEQ ID NO: 53211 - protein, 9 aa, synthetic construct
GANGSLRVF

SEQ ID NO: 53212 - protein, 9 aa, synthetic construct
GANGSLKLR

SEQ ID NO: 53213 - protein, 9 aa, synthetic construct
GANGSLKLK

SEQ ID NO: 53214 - protein, 9 aa, synthetic construct
GANGSLKVR

SEQ ID NO: 53215 - protein, 9 aa, synthetic construct
GANGSARLR

SEQ ID NO: 53216 - protein, 9 aa, synthetic construct
GANGSARLK

SEQ ID NO: 53217 - protein, 9 aa, synthetic construct
GANGSARVR

SEQ ID NO: 53218 - protein, 9 aa, synthetic construct
GANGSAKLK

SEQ ID NO: 53219 - protein, 9 aa, synthetic construct
GANGSIRLY

SEQ ID NO: 53220 - protein, 9 aa, synthetic construct
GANGSIRLR

SEQ ID NO: 53221 - protein, 9 aa, synthetic construct
GANGSIRLK

SEQ ID NO: 53222 - protein, 9 aa, synthetic construct
GANGSIKLK

SEQ ID NO: 53223 - protein, 9 aa, synthetic construct
GANGSIKVR

SEQ ID NO: 53224 - protein, 9 aa, synthetic construct
GANGSIKVK

SEQ ID NO: 53225 - protein, 9 aa, synthetic construct
GANGSGHVR

SEQ ID NO: 53226 - protein, 9 aa, synthetic construct
GANGSGRVK

SEQ ID NO: 53227 - protein, 9 aa, synthetic construct
GANGSGKLK

SEQ ID NO: 53228 - protein, 9 aa, synthetic construct
GANGSGKVR

SEQ ID NO: 53229 - protein, 9 aa, synthetic construct
GANGVVHLY

SEQ ID NO: 53230 - protein, 9 aa, synthetic construct
GANGVVHLR

SEQ ID NO: 53231 - protein, 9 aa, synthetic construct
GANGVVHLF

SEQ ID NO: 53232 - protein, 9 aa, synthetic construct
GANGVVRLR

SEQ ID NO: 53233 - protein, 9 aa, synthetic construct
GANGVVRVR

SEQ ID NO: 53234 - protein, 9 aa, synthetic construct
GANGVVKLR

SEQ ID NO: 53235 - protein, 9 aa, synthetic construct
GANGVVKLK

SEQ ID NO: 53236 - protein, 9 aa, synthetic construct
GANGVVKVR

SEQ ID NO: 53237 - protein, 9 aa, synthetic construct
GANGVVKVK

SEQ ID NO: 53238 - protein, 9 aa, synthetic construct
GANGVLHLY

SEQ ID NO: 53239 - protein, 9 aa, synthetic construct
GANGVLHLR

SEQ ID NO: 53240 - protein, 9 aa, synthetic construct
GANGVLHVY

SEQ ID NO: 53241 - protein, 9 aa, synthetic construct
GANGVLHVF

SEQ ID NO: 53242 - protein, 9 aa, synthetic construct
GANGVLRLY

SEQ ID NO: 53243 - protein, 9 aa, synthetic construct
GANGVLRLK

SEQ ID NO: 53244 - protein, 9 aa, synthetic construct
GANGVLRLF

SEQ ID NO: 53245 - protein, 9 aa, synthetic construct
GANGVLRVR

SEQ ID NO: 53246 - protein, 9 aa, synthetic construct
GANGVARLY

SEQ ID NO: 53247 - protein, 9 aa, synthetic construct
GANGVARLR

SEQ ID NO: 53248 - protein, 9 aa, synthetic construct
GANGVARLH

SEQ ID NO: 53249 - protein, 9 aa, synthetic construct
GANGVARLK

SEQ ID NO: 53250 - protein, 9 aa, synthetic construct
GANGVARLF

SEQ ID NO: 53251 - protein, 9 aa, synthetic construct
GANGVARVR

SEQ ID NO: 53252 - protein, 9 aa, synthetic construct
GANGVARVK

SEQ ID NO: 53253 - protein, 9 aa, synthetic construct
GANGVAKLY

SEQ ID NO: 53254 - protein, 9 aa, synthetic construct
GANGVAKLK

SEQ ID NO: 53255 - protein, 9 aa, synthetic construct
GANGVAKVR

SEQ ID NO: 53256 - protein, 9 aa, synthetic construct
GANGVAKVK

SEQ ID NO: 53257 - protein, 9 aa, synthetic construct
GANGVIHLY

SEQ ID NO: 53258 - protein, 9 aa, synthetic construct
GANGVIRLR

SEQ ID NO: 53259 - protein, 9 aa, synthetic construct
GANGVIRVR

SEQ ID NO: 53260 - protein, 9 aa, synthetic construct
GANGVIKVR

SEQ ID NO: 53261 - protein, 9 aa, synthetic construct
GANGVGRLR

SEQ ID NO: 53262 - protein, 9 aa, synthetic construct
GANGVGRVK

SEQ ID NO: 53263 - protein, 9 aa, synthetic construct
GANGGVHLK

SEQ ID NO: 53264 - protein, 9 aa, synthetic construct
GANGGVHVH

SEQ ID NO: 53265 - protein, 9 aa, synthetic construct
GANGGVRLR

SEQ ID NO: 53266 - protein, 9 aa, synthetic construct
GANGGVRLK

SEQ ID NO: 53267 - protein, 9 aa, synthetic construct
GANGGVRVH

SEQ ID NO: 53268 - protein, 9 aa, synthetic construct
GANGGVKLR

SEQ ID NO: 53269 - protein, 9 aa, synthetic construct
GANGGVKVR

SEQ ID NO: 53270 - protein, 9 aa, synthetic construct
GANGGLHLR

SEQ ID NO: 53271 - protein, 9 aa, synthetic construct
GANGGLHLK

SEQ ID NO: 53272 - protein, 9 aa, synthetic construct
GANGGLHVF

SEQ ID NO: 53273 - protein, 9 aa, synthetic construct
GANGGLRLY

SEQ ID NO: 53274 - protein, 9 aa, synthetic construct
GANGGLRLR

SEQ ID NO: 53275 - protein, 9 aa, synthetic construct
GANGGLRLH

SEQ ID NO: 53276 - protein, 9 aa, synthetic construct
GANGGLRLK

SEQ ID NO: 53277 - protein, 9 aa, synthetic construct
GANGGLRVR

SEQ ID NO: 53278 - protein, 9 aa, synthetic construct
GANGGLRVK

SEQ ID NO: 53279 - protein, 9 aa, synthetic construct
GANGGLKLR

SEQ ID NO: 53280 - protein, 9 aa, synthetic construct
GANGGLKLK

SEQ ID NO: 53281 - protein, 9 aa, synthetic construct
GANGGLKVR

SEQ ID NO: 53282 - protein, 9 aa, synthetic construct
GANGGLKVK

SEQ ID NO: 53283 - protein, 9 aa, synthetic construct
GANGGARLR

SEQ ID NO: 53284 - protein, 9 aa, synthetic construct
GANGGARLK

SEQ ID NO: 53285 - protein, 9 aa, synthetic construct
GANGGARVR

SEQ ID NO: 53286 - protein, 9 aa, synthetic construct
GANGGARVK

SEQ ID NO: 53287 - protein, 9 aa, synthetic construct
GANGGAKLR

SEQ ID NO: 53288 - protein, 9 aa, synthetic construct
GANGGAKLH

SEQ ID NO: 53289 - protein, 9 aa, synthetic construct
GANGGAKLK

SEQ ID NO: 53290 - protein, 9 aa, synthetic construct
GANGGAKVR

SEQ ID NO: 53291 - protein, 9 aa, synthetic construct
GANGGAKVK

SEQ ID NO: 53292 - protein, 9 aa, synthetic construct
GANGGIRLR

SEQ ID NO: 53293 - protein, 9 aa, synthetic construct
GANGGIRLK

SEQ ID NO: 53294 - protein, 9 aa, synthetic construct
GANGGIRVR

SEQ ID NO: 53295 - protein, 9 aa, synthetic construct
GANGGIRVK

SEQ ID NO: 53296 - protein, 9 aa, synthetic construct
GANGGIKLR

SEQ ID NO: 53297 - protein, 9 aa, synthetic construct
GANGGIKLK

SEQ ID NO: 53298 - protein, 9 aa, synthetic construct
GANGGIKVK

SEQ ID NO: 53299 - protein, 9 aa, synthetic construct
GANGGGHLR

SEQ ID NO: 53300 - protein, 9 aa, synthetic construct
GANGGGRLR

SEQ ID NO: 53301 - protein, 9 aa, synthetic construct
GANGGGRVR

SEQ ID NO: 53302 - protein, 9 aa, synthetic construct
GANGGGKVR

SEQ ID NO: 53303 - protein, 9 aa, synthetic construct
GANAAVRLR

SEQ ID NO: 53304 - protein, 9 aa, synthetic construct
GANAAVRLK

SEQ ID NO: 53305 - protein, 9 aa, synthetic construct
GANAALRLR

SEQ ID NO: 53306 - protein, 9 aa, synthetic construct
GANAALRLK

SEQ ID NO: 53307 - protein, 9 aa, synthetic construct
GANAALKVR

SEQ ID NO: 53308 - protein, 9 aa, synthetic construct
GANAAARLR

SEQ ID NO: 53309 - protein, 9 aa, synthetic construct
GANAAARLK

SEQ ID NO: 53310 - protein, 9 aa, synthetic construct
GANAAAKLR

SEQ ID NO: 53311 - protein, 9 aa, synthetic construct
GANAAIKLR

SEQ ID NO: 53312 - protein, 9 aa, synthetic construct
GANAAGRLR

SEQ ID NO: 53313 - protein, 9 aa, synthetic construct
GANAAGKVK

SEQ ID NO: 53314 - protein, 9 aa, synthetic construct
GANATVHLF

SEQ ID NO: 53315 - protein, 9 aa, synthetic construct
GANATVRLK

SEQ ID NO: 53316 - protein, 9 aa, synthetic construct
GANATVRVR

SEQ ID NO: 53317 - protein, 9 aa, synthetic construct
GANATVRVK

SEQ ID NO: 53318 - protein, 9 aa, synthetic construct
GANATVKVR

SEQ ID NO: 53319 - protein, 9 aa, synthetic construct
GANATLHLY

SEQ ID NO: 53320 - protein, 9 aa, synthetic construct
GANATLHVF

SEQ ID NO: 53321 - protein, 9 aa, synthetic construct
GANATLRLY

SEQ ID NO: 53322 - protein, 9 aa, synthetic construct
GANATLRLR

SEQ ID NO: 53323 - protein, 9 aa, synthetic construct
GANATLRLK

SEQ ID NO: 53324 - protein, 9 aa, synthetic construct
GANATLRVR

SEQ ID NO: 53325 - protein, 9 aa, synthetic construct
GANATLRVK

SEQ ID NO: 53326 - protein, 9 aa, synthetic construct
GANATLKLR

SEQ ID NO: 53327 - protein, 9 aa, synthetic construct
GANATLKVK

SEQ ID NO: 53328 - protein, 9 aa, synthetic construct
GANATARLR

SEQ ID NO: 53329 - protein, 9 aa, synthetic construct
GANATARLK

SEQ ID NO: 53330 - protein, 9 aa, synthetic construct
GANATARVR

SEQ ID NO: 53331 - protein, 9 aa, synthetic construct
GANATAKLK

SEQ ID NO: 53332 - protein, 9 aa, synthetic construct
GANATAKVR

SEQ ID NO: 53333 - protein, 9 aa, synthetic construct
GANATIRLR

SEQ ID NO: 53334 - protein, 9 aa, synthetic construct
GANATIRLK

SEQ ID NO: 53335 - protein, 9 aa, synthetic construct
GANATIRVR

SEQ ID NO: 53336 - protein, 9 aa, synthetic construct
GANATIKLR

SEQ ID NO: 53337 - protein, 9 aa, synthetic construct
GANATIKVK

SEQ ID NO: 53338 - protein, 9 aa, synthetic construct
GANATGRVK

SEQ ID NO: 53339 - protein, 9 aa, synthetic construct
GANATGKLR

SEQ ID NO: 53340 - protein, 9 aa, synthetic construct
GANATGKLK

SEQ ID NO: 53341 - protein, 9 aa, synthetic construct
GANATGKVK

SEQ ID NO: 53342 - protein, 9 aa, synthetic construct
GANASVHVH

SEQ ID NO: 53343 - protein, 9 aa, synthetic construct
GANASVRLR

SEQ ID NO: 53344 - protein, 9 aa, synthetic construct
GANASVRLK

SEQ ID NO: 53345 - protein, 9 aa, synthetic construct
GANASVRVR

SEQ ID NO: 53346 - protein, 9 aa, synthetic construct
GANASVKLR

SEQ ID NO: 53347 - protein, 9 aa, synthetic construct
GANASVKLK

SEQ ID NO: 53348 - protein, 9 aa, synthetic construct
GANASVKVR

SEQ ID NO: 53349 - protein, 9 aa, synthetic construct
GANASLHLY

SEQ ID NO: 53350 - protein, 9 aa, synthetic construct
GANASLHLF

SEQ ID NO: 53351 - protein, 9 aa, synthetic construct
GANASLRLR

SEQ ID NO: 53352 - protein, 9 aa, synthetic construct
GANASLRLK

SEQ ID NO: 53353 - protein, 9 aa, synthetic construct
GANASLRLF

SEQ ID NO: 53354 - protein, 9 aa, synthetic construct
GANASLRVR

SEQ ID NO: 53355 - protein, 9 aa, synthetic construct
GANASLRVK

SEQ ID NO: 53356 - protein, 9 aa, synthetic construct
GANASLKLK

SEQ ID NO: 53357 - protein, 9 aa, synthetic construct
GANASLKVR

SEQ ID NO: 53358 - protein, 9 aa, synthetic construct
GANASLKVK

SEQ ID NO: 53359 - protein, 9 aa, synthetic construct
GANASARLR

SEQ ID NO: 53360 - protein, 9 aa, synthetic construct
GANASARLK

SEQ ID NO: 53361 - protein, 9 aa, synthetic construct
GANASAKLK

SEQ ID NO: 53362 - protein, 9 aa, synthetic construct
GANASAKVR

SEQ ID NO: 53363 - protein, 9 aa, synthetic construct
GANASAKVK

SEQ ID NO: 53364 - protein, 9 aa, synthetic construct
GANASIKLR

SEQ ID NO: 53365 - protein, 9 aa, synthetic construct
GANASGKLR

SEQ ID NO: 53366 - protein, 9 aa, synthetic construct
GANASGKVR

SEQ ID NO: 53367 - protein, 9 aa, synthetic construct
GANAVVHLR

SEQ ID NO: 53368 - protein, 9 aa, synthetic construct
GANAVVHLF

SEQ ID NO: 53369 - protein, 9 aa, synthetic construct
GANAVVRVY

SEQ ID NO: 53370 - protein, 9 aa, synthetic construct
GANAVVRVK

SEQ ID NO: 53371 - protein, 9 aa, synthetic construct
GANAVVKLK

SEQ ID NO: 53372 - protein, 9 aa, synthetic construct
GANAVVKVK

SEQ ID NO: 53373 - protein, 9 aa, synthetic construct
GANAVLHLY

SEQ ID NO: 53374 - protein, 9 aa, synthetic construct
GANAVLHLR

SEQ ID NO: 53375 - protein, 9 aa, synthetic construct
GANAVLHLH

SEQ ID NO: 53376 - protein, 9 aa, synthetic construct
GANAVLHLK

SEQ ID NO: 53377 - protein, 9 aa, synthetic construct
GANAVLHVR

SEQ ID NO: 53378 - protein, 9 aa, synthetic construct
GANAVLHVK

SEQ ID NO: 53379 - protein, 9 aa, synthetic construct
GANAVLHVF

SEQ ID NO: 53380 - protein, 9 aa, synthetic construct
GANAVLRLR

SEQ ID NO: 53381 - protein, 9 aa, synthetic construct
GANAVLRLK

SEQ ID NO: 53382 - protein, 9 aa, synthetic construct
GANAVLRVY

SEQ ID NO: 53383 - protein, 9 aa, synthetic construct
GANAVLRVR

SEQ ID NO: 53384 - protein, 9 aa, synthetic construct
GANAVLRVK

SEQ ID NO: 53385 - protein, 9 aa, synthetic construct
GANAVLKVR

SEQ ID NO: 53386 - protein, 9 aa, synthetic construct
GANAVLKVK

SEQ ID NO: 53387 - protein, 9 aa, synthetic construct
GANAVARLR

SEQ ID NO: 53388 - protein, 9 aa, synthetic construct
GANAVARLK

SEQ ID NO: 53389 - protein, 9 aa, synthetic construct
GANAVAKLR

SEQ ID NO: 53390 - protein, 9 aa, synthetic construct
GANAVAKLK

SEQ ID NO: 53391 - protein, 9 aa, synthetic construct
GANAVAKVK

SEQ ID NO: 53392 - protein, 9 aa, synthetic construct
GANAVIRLR

SEQ ID NO: 53393 - protein, 9 aa, synthetic construct
GANAVIKLR

SEQ ID NO: 53394 - protein, 9 aa, synthetic construct
GANAVIKLK

SEQ ID NO: 53395 - protein, 9 aa, synthetic construct
GANAVIKVY

SEQ ID NO: 53396 - protein, 9 aa, synthetic construct
GANAVIKVR

SEQ ID NO: 53397 - protein, 9 aa, synthetic construct
GANAVGRLR

SEQ ID NO: 53398 - protein, 9 aa, synthetic construct
GANAVGRLK

SEQ ID NO: 53399 - protein, 9 aa, synthetic construct
GANAVGRVR

SEQ ID NO: 53400 - protein, 9 aa, synthetic construct
GANAVGKLR

SEQ ID NO: 53401 - protein, 9 aa, synthetic construct
GANAVGKLK

SEQ ID NO: 53402 - protein, 9 aa, synthetic construct
GANAGVHLR

SEQ ID NO: 53403 - protein, 9 aa, synthetic construct
GANAGVHLH

SEQ ID NO: 53404 - protein, 9 aa, synthetic construct
GANAGVHLF

SEQ ID NO: 53405 - protein, 9 aa, synthetic construct
GANAGVHVH

SEQ ID NO: 53406 - protein, 9 aa, synthetic construct
GANAGVRLR

SEQ ID NO: 53407 - protein, 9 aa, synthetic construct
GANAGLHLY

SEQ ID NO: 53408 - protein, 9 aa, synthetic construct
GANAGLHLR

SEQ ID NO: 53409 - protein, 9 aa, synthetic construct
GANAGLHLH

SEQ ID NO: 53410 - protein, 9 aa, synthetic construct
GANAGLHLK

SEQ ID NO: 53411 - protein, 9 aa, synthetic construct
GANAGLHLF

SEQ ID NO: 53412 - protein, 9 aa, synthetic construct
GANAGLHVY

SEQ ID NO: 53413 - protein, 9 aa, synthetic construct
GANAGLHVK

SEQ ID NO: 53414 - protein, 9 aa, synthetic construct
GANAGLHVF

SEQ ID NO: 53415 - protein, 9 aa, synthetic construct
GANAGLRLY

SEQ ID NO: 53416 - protein, 9 aa, synthetic construct
GANAGLRLR

SEQ ID NO: 53417 - protein, 9 aa, synthetic construct
GANAGLRLK

SEQ ID NO: 53418 - protein, 9 aa, synthetic construct
GANAGLRLF

SEQ ID NO: 53419 - protein, 9 aa, synthetic construct
GANAGLRVY

SEQ ID NO: 53420 - protein, 9 aa, synthetic construct
GANAGLRVR

SEQ ID NO: 53421 - protein, 9 aa, synthetic construct
GANAGLRVH

SEQ ID NO: 53422 - protein, 9 aa, synthetic construct
GANAGLRVK

SEQ ID NO: 53423 - protein, 9 aa, synthetic construct
GANAGLKLR

SEQ ID NO: 53424 - protein, 9 aa, synthetic construct
GANAGLKLH

SEQ ID NO: 53425 - protein, 9 aa, synthetic construct
GANAGLKLK

SEQ ID NO: 53426 - protein, 9 aa, synthetic construct
GANAGLKVR

SEQ ID NO: 53427 - protein, 9 aa, synthetic construct
GANAGLKVK

SEQ ID NO: 53428 - protein, 9 aa, synthetic construct
GANAGARLR

SEQ ID NO: 53429 - protein, 9 aa, synthetic construct
GANAGARLH

SEQ ID NO: 53430 - protein, 9 aa, synthetic construct
GANAGARLK

SEQ ID NO: 53431 - protein, 9 aa, synthetic construct
GANAGARVR

SEQ ID NO: 53432 - protein, 9 aa, synthetic construct
GANAGARVK

SEQ ID NO: 53433 - protein, 9 aa, synthetic construct
GANAGAKLR

SEQ ID NO: 53434 - protein, 9 aa, synthetic construct
GANAGAKLK

SEQ ID NO: 53435 - protein, 9 aa, synthetic construct
GANAGAKVR

SEQ ID NO: 53436 - protein, 9 aa, synthetic construct
GANAGAKVK

SEQ ID NO: 53437 - protein, 9 aa, synthetic construct
GANAGIHLF

SEQ ID NO: 53438 - protein, 9 aa, synthetic construct
GANAGIRLR

SEQ ID NO: 53439 - protein, 9 aa, synthetic construct
GANAGIRVK

SEQ ID NO: 53440 - protein, 9 aa, synthetic construct
GANAGIKVK

SEQ ID NO: 53441 - protein, 9 aa, synthetic construct
GANAGGRLK

SEQ ID NO: 53442 - protein, 9 aa, synthetic construct
GAQGAVHLF

SEQ ID NO: 53443 - protein, 9 aa, synthetic construct
GAQGAVRLR

SEQ ID NO: 53444 - protein, 9 aa, synthetic construct
GAQGAVRLK

SEQ ID NO: 53445 - protein, 9 aa, synthetic construct
GAQGAVRVR

SEQ ID NO: 53446 - protein, 9 aa, synthetic construct
GAQGAVRVK

SEQ ID NO: 53447 - protein, 9 aa, synthetic construct
GAQGAVKLR

SEQ ID NO: 53448 - protein, 9 aa, synthetic construct
GAQGAVKLK

SEQ ID NO: 53449 - protein, 9 aa, synthetic construct
GAQGAVKVK

SEQ ID NO: 53450 - protein, 9 aa, synthetic construct
GAQGALHLF

SEQ ID NO: 53451 - protein, 9 aa, synthetic construct
GAQGALHVY

SEQ ID NO: 53452 - protein, 9 aa, synthetic construct
GAQGALRLR

SEQ ID NO: 53453 - protein, 9 aa, synthetic construct
GAQGALRLH

SEQ ID NO: 53454 - protein, 9 aa, synthetic construct
GAQGALRLK

SEQ ID NO: 53455 - protein, 9 aa, synthetic construct
GAQGALRLF

SEQ ID NO: 53456 - protein, 9 aa, synthetic construct
GAQGALRVR

SEQ ID NO: 53457 - protein, 9 aa, synthetic construct
GAQGALRVH

SEQ ID NO: 53458 - protein, 9 aa, synthetic construct
GAQGALRVK

SEQ ID NO: 53459 - protein, 9 aa, synthetic construct
GAQGALKLR

SEQ ID NO: 53460 - protein, 9 aa, synthetic construct
GAQGALKLK

SEQ ID NO: 53461 - protein, 9 aa, synthetic construct
GAQGALKVY

SEQ ID NO: 53462 - protein, 9 aa, synthetic construct
GAQGALKVR

SEQ ID NO: 53463 - protein, 9 aa, synthetic construct
GAQGALKVK

SEQ ID NO: 53464 - protein, 9 aa, synthetic construct
GAQGAAHLR

SEQ ID NO: 53465 - protein, 9 aa, synthetic construct
GAQGAAHLK

SEQ ID NO: 53466 - protein, 9 aa, synthetic construct
GAQGAAHLF

SEQ ID NO: 53467 - protein, 9 aa, synthetic construct
GAQGAAHVR

SEQ ID NO: 53468 - protein, 9 aa, synthetic construct
GAQGAARLR

SEQ ID NO: 53469 - protein, 9 aa, synthetic construct
GAQGAARLH

SEQ ID NO: 53470 - protein, 9 aa, synthetic construct
GAQGAARLK

SEQ ID NO: 53471 - protein, 9 aa, synthetic construct
GAQGAARVR

SEQ ID NO: 53472 - protein, 9 aa, synthetic construct
GAQGAARVH

SEQ ID NO: 53473 - protein, 9 aa, synthetic construct
GAQGAARVK

SEQ ID NO: 53474 - protein, 9 aa, synthetic construct
GAQGAARVF

SEQ ID NO: 53475 - protein, 9 aa, synthetic construct
GAQGAAKLR

SEQ ID NO: 53476 - protein, 9 aa, synthetic construct
GAQGAAKVR

SEQ ID NO: 53477 - protein, 9 aa, synthetic construct
GAQGAAKVK

SEQ ID NO: 53478 - protein, 9 aa, synthetic construct
GAQGAIHLR

SEQ ID NO: 53479 - protein, 9 aa, synthetic construct
GAQGAIHLH

SEQ ID NO: 53480 - protein, 9 aa, synthetic construct
GAQGAIHVR

SEQ ID NO: 53481 - protein, 9 aa, synthetic construct
GAQGAIHVH

SEQ ID NO: 53482 - protein, 9 aa, synthetic construct
GAQGAIHVF

SEQ ID NO: 53483 - protein, 9 aa, synthetic construct
GAQGAIRLY

SEQ ID NO: 53484 - protein, 9 aa, synthetic construct
GAQGAIRLR

SEQ ID NO: 53485 - protein, 9 aa, synthetic construct
GAQGAIRLK

SEQ ID NO: 53486 - protein, 9 aa, synthetic construct
GAQGAIRVR

SEQ ID NO: 53487 - protein, 9 aa, synthetic construct
GAQGAIRVK

SEQ ID NO: 53488 - protein, 9 aa, synthetic construct
GAQGAIKLK

SEQ ID NO: 53489 - protein, 9 aa, synthetic construct
GAQGAIKVK

SEQ ID NO: 53490 - protein, 9 aa, synthetic construct
GAQGAIKVF

SEQ ID NO: 53491 - protein, 9 aa, synthetic construct
GAQGAGHLR

SEQ ID NO: 53492 - protein, 9 aa, synthetic construct
GAQGAGHVY

SEQ ID NO: 53493 - protein, 9 aa, synthetic construct
GAQGAGHVH

SEQ ID NO: 53494 - protein, 9 aa, synthetic construct
GAQGAGHVK

SEQ ID NO: 53495 - protein, 9 aa, synthetic construct
GAQGAGHVF

SEQ ID NO: 53496 - protein, 9 aa, synthetic construct
GAQGAGRLR

SEQ ID NO: 53497 - protein, 9 aa, synthetic construct
GAQGAGRLK

SEQ ID NO: 53498 - protein, 9 aa, synthetic construct
GAQGAGRVR

SEQ ID NO: 53499 - protein, 9 aa, synthetic construct
GAQGAGRVK

SEQ ID NO: 53500 - protein, 9 aa, synthetic construct
GAQGAGKLR

SEQ ID NO: 53501 - protein, 9 aa, synthetic construct
GAQGAGKLK

SEQ ID NO: 53502 - protein, 9 aa, synthetic construct
GAQGAGKVY

SEQ ID NO: 53503 - protein, 9 aa, synthetic construct
GAQGAGKVR

SEQ ID NO: 53504 - protein, 9 aa, synthetic construct
GAQGAGKVK

SEQ ID NO: 53505 - protein, 9 aa, synthetic construct
GAQGTVRLR

SEQ ID NO: 53506 - protein, 9 aa, synthetic construct
GAQGTVRLK

SEQ ID NO: 53507 - protein, 9 aa, synthetic construct
GAQGTVRVR

SEQ ID NO: 53508 - protein, 9 aa, synthetic construct
GAQGTVRVK

SEQ ID NO: 53509 - protein, 9 aa, synthetic construct
GAQGTVKVR

SEQ ID NO: 53510 - protein, 9 aa, synthetic construct
GAQGTLRLK

SEQ ID NO: 53511 - protein, 9 aa, synthetic construct
GAQGTLRVR

SEQ ID NO: 53512 - protein, 9 aa, synthetic construct
GAQGTLKLK

SEQ ID NO: 53513 - protein, 9 aa, synthetic construct
GAQGTLKVR

SEQ ID NO: 53514 - protein, 9 aa, synthetic construct
GAQGTLKVF

SEQ ID NO: 53515 - protein, 9 aa, synthetic construct
GAQGTARLR

SEQ ID NO: 53516 - protein, 9 aa, synthetic construct
GAQGTARLK

SEQ ID NO: 53517 - protein, 9 aa, synthetic construct
GAQGTARVR

SEQ ID NO: 53518 - protein, 9 aa, synthetic construct
GAQGTAKVR

SEQ ID NO: 53519 - protein, 9 aa, synthetic construct
GAQGTIRVR

SEQ ID NO: 53520 - protein, 9 aa, synthetic construct
GAQGTIRVK

SEQ ID NO: 53521 - protein, 9 aa, synthetic construct
GAQGTIKVR

SEQ ID NO: 53522 - protein, 9 aa, synthetic construct
GAQGTIKVK

SEQ ID NO: 53523 - protein, 9 aa, synthetic construct
GAQGTGRLK

SEQ ID NO: 53524 - protein, 9 aa, synthetic construct
GAQGTGRVR

SEQ ID NO: 53525 - protein, 9 aa, synthetic construct
GAQGTGRVK

SEQ ID NO: 53526 - protein, 9 aa, synthetic construct
GAQGSVHVH

SEQ ID NO: 53527 - protein, 9 aa, synthetic construct
GAQGSVRLK

SEQ ID NO: 53528 - protein, 9 aa, synthetic construct
GAQGSVRVR

SEQ ID NO: 53529 - protein, 9 aa, synthetic construct
GAQGSVKLR

SEQ ID NO: 53530 - protein, 9 aa, synthetic construct
GAQGSLHLK

SEQ ID NO: 53531 - protein, 9 aa, synthetic construct
GAQGSLRLY

SEQ ID NO: 53532 - protein, 9 aa, synthetic construct
GAQGSLRLR

SEQ ID NO: 53533 - protein, 9 aa, synthetic construct
GAQGSLRLK

SEQ ID NO: 53534 - protein, 9 aa, synthetic construct
GAQGSLRVR

SEQ ID NO: 53535 - protein, 9 aa, synthetic construct
GAQGSLRVK

SEQ ID NO: 53536 - protein, 9 aa, synthetic construct
GAQGSLKLK

SEQ ID NO: 53537 - protein, 9 aa, synthetic construct
GAQGSLKVY

SEQ ID NO: 53538 - protein, 9 aa, synthetic construct
GAQGSLKVK

SEQ ID NO: 53539 - protein, 9 aa, synthetic construct
GAQGSARLR

SEQ ID NO: 53540 - protein, 9 aa, synthetic construct
GAQGSARVR

SEQ ID NO: 53541 - protein, 9 aa, synthetic construct
GAQGSARVK

SEQ ID NO: 53542 - protein, 9 aa, synthetic construct
GAQGSAKLR

SEQ ID NO: 53543 - protein, 9 aa, synthetic construct
GAQGSAKLK

SEQ ID NO: 53544 - protein, 9 aa, synthetic construct
GAQGSAKVR

SEQ ID NO: 53545 - protein, 9 aa, synthetic construct
GAQGSAKVK

SEQ ID NO: 53546 - protein, 9 aa, synthetic construct
GAQGSIRLK

SEQ ID NO: 53547 - protein, 9 aa, synthetic construct
GAQGSIKVK

SEQ ID NO: 53548 - protein, 9 aa, synthetic construct
GAQGSGHVY

SEQ ID NO: 53549 - protein, 9 aa, synthetic construct
GAQGSGRVK

SEQ ID NO: 53550 - protein, 9 aa, synthetic construct
GAQGSGKLR

SEQ ID NO: 53551 - protein, 9 aa, synthetic construct
GAQGSGKLK

SEQ ID NO: 53552 - protein, 9 aa, synthetic construct
GAQGSGKVR

SEQ ID NO: 53553 - protein, 9 aa, synthetic construct
GAQGVVRLY

SEQ ID NO: 53554 - protein, 9 aa, synthetic construct
GAQGVVRLR

SEQ ID NO: 53555 - protein, 9 aa, synthetic construct
GAQGVVRVR

SEQ ID NO: 53556 - protein, 9 aa, synthetic construct
GAQGVVRVK

SEQ ID NO: 53557 - protein, 9 aa, synthetic construct
GAQGVVKLR

SEQ ID NO: 53558 - protein, 9 aa, synthetic construct
GAQGVVKVR

SEQ ID NO: 53559 - protein, 9 aa, synthetic construct
GAQGVLRLR

SEQ ID NO: 53560 - protein, 9 aa, synthetic construct
GAQGVLRLK

SEQ ID NO: 53561 - protein, 9 aa, synthetic construct
GAQGVLRVK

SEQ ID NO: 53562 - protein, 9 aa, synthetic construct
GAQGVLKVR

SEQ ID NO: 53563 - protein, 9 aa, synthetic construct
GAQGVARLR

SEQ ID NO: 53564 - protein, 9 aa, synthetic construct
GAQGVARLK

SEQ ID NO: 53565 - protein, 9 aa, synthetic construct
GAQGVARVK

SEQ ID NO: 53566 - protein, 9 aa, synthetic construct
GAQGVAKLR

SEQ ID NO: 53567 - protein, 9 aa, synthetic construct
GAQGVAKLK

SEQ ID NO: 53568 - protein, 9 aa, synthetic construct
GAQGVIRVR

SEQ ID NO: 53569 - protein, 9 aa, synthetic construct
GAQGVIKVR

SEQ ID NO: 53570 - protein, 9 aa, synthetic construct
GAQGVGRLK

SEQ ID NO: 53571 - protein, 9 aa, synthetic construct
GAQGGVHVH

SEQ ID NO: 53572 - protein, 9 aa, synthetic construct
GAQGGVRLR

SEQ ID NO: 53573 - protein, 9 aa, synthetic construct
GAQGGVRLK

SEQ ID NO: 53574 - protein, 9 aa, synthetic construct
GAQGGVRVR

SEQ ID NO: 53575 - protein, 9 aa, synthetic construct
GAQGGVKLK

SEQ ID NO: 53576 - protein, 9 aa, synthetic construct
GAQGGVKVR

SEQ ID NO: 53577 - protein, 9 aa, synthetic construct
GAQGGLHLR

SEQ ID NO: 53578 - protein, 9 aa, synthetic construct
GAQGGLHLK

SEQ ID NO: 53579 - protein, 9 aa, synthetic construct
GAQGGLRLY

SEQ ID NO: 53580 - protein, 9 aa, synthetic construct
GAQGGLRLR

SEQ ID NO: 53581 - protein, 9 aa, synthetic construct
GAQGGLRLH

SEQ ID NO: 53582 - protein, 9 aa, synthetic construct
GAQGGLRLK

SEQ ID NO: 53583 - protein, 9 aa, synthetic construct
GAQGGLRVY

SEQ ID NO: 53584 - protein, 9 aa, synthetic construct
GAQGGLRVR

SEQ ID NO: 53585 - protein, 9 aa, synthetic construct
GAQGGLRVK

SEQ ID NO: 53586 - protein, 9 aa, synthetic construct
GAQGGLKVK

SEQ ID NO: 53587 - protein, 9 aa, synthetic construct
GAQGGAHLK

SEQ ID NO: 53588 - protein, 9 aa, synthetic construct
GAQGGAHVR

SEQ ID NO: 53589 - protein, 9 aa, synthetic construct
GAQGGARLY

SEQ ID NO: 53590 - protein, 9 aa, synthetic construct
GAQGGARLR

SEQ ID NO: 53591 - protein, 9 aa, synthetic construct
GAQGGARLH

SEQ ID NO: 53592 - protein, 9 aa, synthetic construct
GAQGGARLK

SEQ ID NO: 53593 - protein, 9 aa, synthetic construct
GAQGGARLF

SEQ ID NO: 53594 - protein, 9 aa, synthetic construct
GAQGGARVH

SEQ ID NO: 53595 - protein, 9 aa, synthetic construct
GAQGGARVK

SEQ ID NO: 53596 - protein, 9 aa, synthetic construct
GAQGGAKLR

SEQ ID NO: 53597 - protein, 9 aa, synthetic construct
GAQGGAKLK

SEQ ID NO: 53598 - protein, 9 aa, synthetic construct
GAQGGAKLF

SEQ ID NO: 53599 - protein, 9 aa, synthetic construct
GAQGGAKVY

SEQ ID NO: 53600 - protein, 9 aa, synthetic construct
GAQGGAKVR

SEQ ID NO: 53601 - protein, 9 aa, synthetic construct
GAQGGAKVK

SEQ ID NO: 53602 - protein, 9 aa, synthetic construct
GAQGGIKLR

SEQ ID NO: 53603 - protein, 9 aa, synthetic construct
GAQGGGHLR

SEQ ID NO: 53604 - protein, 9 aa, synthetic construct
GAQGGGHVR

SEQ ID NO: 53605 - protein, 9 aa, synthetic construct
GAQGGGHVK

SEQ ID NO: 53606 - protein, 9 aa, synthetic construct
GAQGGGRLR

SEQ ID NO: 53607 - protein, 9 aa, synthetic construct
GAQGGGRVR

SEQ ID NO: 53608 - protein, 9 aa, synthetic construct
GAQGGGKLR

SEQ ID NO: 53609 - protein, 9 aa, synthetic construct
GAQGGGKLK

SEQ ID NO: 53610 - protein, 9 aa, synthetic construct
GAQGGGKVR

SEQ ID NO: 53611 - protein, 9 aa, synthetic construct
GAQGGGKVK

SEQ ID NO: 53612 - protein, 9 aa, synthetic construct
GAQAAVRVR

SEQ ID NO: 53613 - protein, 9 aa, synthetic construct
GAQAALRLR

SEQ ID NO: 53614 - protein, 9 aa, synthetic construct
GAQAALRLK

SEQ ID NO: 53615 - protein, 9 aa, synthetic construct
GAQAALRVR

SEQ ID NO: 53616 - protein, 9 aa, synthetic construct
GAQAALRVK

SEQ ID NO: 53617 - protein, 9 aa, synthetic construct
GAQAALKLR

SEQ ID NO: 53618 - protein, 9 aa, synthetic construct
GAQAALKLK

SEQ ID NO: 53619 - protein, 9 aa, synthetic construct
GAQAALKVR

SEQ ID NO: 53620 - protein, 9 aa, synthetic construct
GAQAAARLR

SEQ ID NO: 53621 - protein, 9 aa, synthetic construct
GAQAAARVK

SEQ ID NO: 53622 - protein, 9 aa, synthetic construct
GAQAAAKLR

SEQ ID NO: 53623 - protein, 9 aa, synthetic construct
GAQAAAKLK

SEQ ID NO: 53624 - protein, 9 aa, synthetic construct
GAQAAGRLR

SEQ ID NO: 53625 - protein, 9 aa, synthetic construct
GAQATVRVR

SEQ ID NO: 53626 - protein, 9 aa, synthetic construct
GAQATVKLR

SEQ ID NO: 53627 - protein, 9 aa, synthetic construct
GAQATLRLR

SEQ ID NO: 53628 - protein, 9 aa, synthetic construct
GAQATLRLK

SEQ ID NO: 53629 - protein, 9 aa, synthetic construct
GAQATLRVY

SEQ ID NO: 53630 - protein, 9 aa, synthetic construct
GAQATLRVK

SEQ ID NO: 53631 - protein, 9 aa, synthetic construct
GAQATLKLR

SEQ ID NO: 53632 - protein, 9 aa, synthetic construct
GAQATLKVY

SEQ ID NO: 53633 - protein, 9 aa, synthetic construct
GAQATLKVR

SEQ ID NO: 53634 - protein, 9 aa, synthetic construct
GAQATLKVK

SEQ ID NO: 53635 - protein, 9 aa, synthetic construct
GAQATARLR

SEQ ID NO: 53636 - protein, 9 aa, synthetic construct
GAQATARVR

SEQ ID NO: 53637 - protein, 9 aa, synthetic construct
GAQATARVK

SEQ ID NO: 53638 - protein, 9 aa, synthetic construct
GAQATAKVR

SEQ ID NO: 53639 - protein, 9 aa, synthetic construct
GAQATIRLR

SEQ ID NO: 53640 - protein, 9 aa, synthetic construct
GAQATIRLK

SEQ ID NO: 53641 - protein, 9 aa, synthetic construct
GAQATIRVR

SEQ ID NO: 53642 - protein, 9 aa, synthetic construct
GAQATIRVK

SEQ ID NO: 53643 - protein, 9 aa, synthetic construct
GAQATIKLK

SEQ ID NO: 53644 - protein, 9 aa, synthetic construct
GAQATIKVR

SEQ ID NO: 53645 - protein, 9 aa, synthetic construct
GAQATIKVK

SEQ ID NO: 53646 - protein, 9 aa, synthetic construct
GAQATGRLR

SEQ ID NO: 53647 - protein, 9 aa, synthetic construct
GAQATGRVR

SEQ ID NO: 53648 - protein, 9 aa, synthetic construct
GAQATGKVR

SEQ ID NO: 53649 - protein, 9 aa, synthetic construct
GAQATGKVK

SEQ ID NO: 53650 - protein, 9 aa, synthetic construct
GAQASVHVH

SEQ ID NO: 53651 - protein, 9 aa, synthetic construct
GAQASVRLK

SEQ ID NO: 53652 - protein, 9 aa, synthetic construct
GAQASVRVR

SEQ ID NO: 53653 - protein, 9 aa, synthetic construct
GAQASVKLR

SEQ ID NO: 53654 - protein, 9 aa, synthetic construct
GAQASVKLK

SEQ ID NO: 53655 - protein, 9 aa, synthetic construct
GAQASVKVR

SEQ ID NO: 53656 - protein, 9 aa, synthetic construct
GAQASLHLR

SEQ ID NO: 53657 - protein, 9 aa, synthetic construct
GAQASLRLY

SEQ ID NO: 53658 - protein, 9 aa, synthetic construct
GAQASLRLR

SEQ ID NO: 53659 - protein, 9 aa, synthetic construct
GAQASLRLH

SEQ ID NO: 53660 - protein, 9 aa, synthetic construct
GAQASLRLK

SEQ ID NO: 53661 - protein, 9 aa, synthetic construct
GAQASLRVY

SEQ ID NO: 53662 - protein, 9 aa, synthetic construct
GAQASLRVR

SEQ ID NO: 53663 - protein, 9 aa, synthetic construct
GAQASLRVK

SEQ ID NO: 53664 - protein, 9 aa, synthetic construct
GAQASLRVF

SEQ ID NO: 53665 - protein, 9 aa, synthetic construct
GAQASLKLK

SEQ ID NO: 53666 - protein, 9 aa, synthetic construct
GAQASLKVR

SEQ ID NO: 53667 - protein, 9 aa, synthetic construct
GAQASARLR

SEQ ID NO: 53668 - protein, 9 aa, synthetic construct
GAQASARLH

SEQ ID NO: 53669 - protein, 9 aa, synthetic construct
GAQASARVR

SEQ ID NO: 53670 - protein, 9 aa, synthetic construct
GAQASARVK

SEQ ID NO: 53671 - protein, 9 aa, synthetic construct
GAQASAKLR

SEQ ID NO: 53672 - protein, 9 aa, synthetic construct
GAQASAKLK

SEQ ID NO: 53673 - protein, 9 aa, synthetic construct
GAQASAKVR

SEQ ID NO: 53674 - protein, 9 aa, synthetic construct
GAQASAKVK

SEQ ID NO: 53675 - protein, 9 aa, synthetic construct
GAQASIRLK

SEQ ID NO: 53676 - protein, 9 aa, synthetic construct
GAQASIRVR

SEQ ID NO: 53677 - protein, 9 aa, synthetic construct
GAQASIKLK

SEQ ID NO: 53678 - protein, 9 aa, synthetic construct
GAQASIKVK

SEQ ID NO: 53679 - protein, 9 aa, synthetic construct
GAQASGHVH

SEQ ID NO: 53680 - protein, 9 aa, synthetic construct
GAQASGRLR

SEQ ID NO: 53681 - protein, 9 aa, synthetic construct
GAQASGKVR

SEQ ID NO: 53682 - protein, 9 aa, synthetic construct
GAQAVVRLR

SEQ ID NO: 53683 - protein, 9 aa, synthetic construct
GAQAVVRVR

SEQ ID NO: 53684 - protein, 9 aa, synthetic construct
GAQAVVRVK

SEQ ID NO: 53685 - protein, 9 aa, synthetic construct
GAQAVVKLR

SEQ ID NO: 53686 - protein, 9 aa, synthetic construct
GAQAVVKLK

SEQ ID NO: 53687 - protein, 9 aa, synthetic construct
GAQAVVKVR

SEQ ID NO: 53688 - protein, 9 aa, synthetic construct
GAQAVVKVK

SEQ ID NO: 53689 - protein, 9 aa, synthetic construct
GAQAVLHLY

SEQ ID NO: 53690 - protein, 9 aa, synthetic construct
GAQAVLHLR

SEQ ID NO: 53691 - protein, 9 aa, synthetic construct
GAQAVLHLH

SEQ ID NO: 53692 - protein, 9 aa, synthetic construct
GAQAVLHLK

SEQ ID NO: 53693 - protein, 9 aa, synthetic construct
GAQAVLHVY

SEQ ID NO: 53694 - protein, 9 aa, synthetic construct
GAQAVLHVR

SEQ ID NO: 53695 - protein, 9 aa, synthetic construct
GAQAVLHVK

SEQ ID NO: 53696 - protein, 9 aa, synthetic construct
GAQAVLHVF

SEQ ID NO: 53697 - protein, 9 aa, synthetic construct
GAQAVLRLR

SEQ ID NO: 53698 - protein, 9 aa, synthetic construct
GAQAVLRLK

SEQ ID NO: 53699 - protein, 9 aa, synthetic construct
GAQAVLRLF

SEQ ID NO: 53700 - protein, 9 aa, synthetic construct
GAQAVLRVH

SEQ ID NO: 53701 - protein, 9 aa, synthetic construct
GAQAVLKLR

SEQ ID NO: 53702 - protein, 9 aa, synthetic construct
GAQAVLKLK

SEQ ID NO: 53703 - protein, 9 aa, synthetic construct
GAQAVLKVH

SEQ ID NO: 53704 - protein, 9 aa, synthetic construct
GAQAVLKVK

SEQ ID NO: 53705 - protein, 9 aa, synthetic construct
GAQAVAHLY

SEQ ID NO: 53706 - protein, 9 aa, synthetic construct
GAQAVARLR

SEQ ID NO: 53707 - protein, 9 aa, synthetic construct
GAQAVARVK

SEQ ID NO: 53708 - protein, 9 aa, synthetic construct
GAQAVAKLR

SEQ ID NO: 53709 - protein, 9 aa, synthetic construct
GAQAVAKLK

SEQ ID NO: 53710 - protein, 9 aa, synthetic construct
GAQAVAKVK

SEQ ID NO: 53711 - protein, 9 aa, synthetic construct
GAQAVIRLR

SEQ ID NO: 53712 - protein, 9 aa, synthetic construct
GAQAVIKLR

SEQ ID NO: 53713 - protein, 9 aa, synthetic construct
GAQAVIKLK

SEQ ID NO: 53714 - protein, 9 aa, synthetic construct
GAQAVIKVR

SEQ ID NO: 53715 - protein, 9 aa, synthetic construct
GAQAVIKVK

SEQ ID NO: 53716 - protein, 9 aa, synthetic construct
GAQAVGRLK

SEQ ID NO: 53717 - protein, 9 aa, synthetic construct
GAQAVGKLR

SEQ ID NO: 53718 - protein, 9 aa, synthetic construct
GAQAGVHLY

SEQ ID NO: 53719 - protein, 9 aa, synthetic construct
GAQAGVHLR

SEQ ID NO: 53720 - protein, 9 aa, synthetic construct
GAQAGVHLH

SEQ ID NO: 53721 - protein, 9 aa, synthetic construct
GAQAGVHLK

SEQ ID NO: 53722 - protein, 9 aa, synthetic construct
GAQAGVHVH

SEQ ID NO: 53723 - protein, 9 aa, synthetic construct
GAQAGVRLR

SEQ ID NO: 53724 - protein, 9 aa, synthetic construct
GAQAGVRLK

SEQ ID NO: 53725 - protein, 9 aa, synthetic construct
GAQAGVRLF

SEQ ID NO: 53726 - protein, 9 aa, synthetic construct
GAQAGVRVR

SEQ ID NO: 53727 - protein, 9 aa, synthetic construct
GAQAGVKLK

SEQ ID NO: 53728 - protein, 9 aa, synthetic construct
GAQAGLHLY

SEQ ID NO: 53729 - protein, 9 aa, synthetic construct
GAQAGLHLR

SEQ ID NO: 53730 - protein, 9 aa, synthetic construct
GAQAGLHLH

SEQ ID NO: 53731 - protein, 9 aa, synthetic construct
GAQAGLHLK

SEQ ID NO: 53732 - protein, 9 aa, synthetic construct
GAQAGLHLF

SEQ ID NO: 53733 - protein, 9 aa, synthetic construct
GAQAGLHVR

SEQ ID NO: 53734 - protein, 9 aa, synthetic construct
GAQAGLHVK

SEQ ID NO: 53735 - protein, 9 aa, synthetic construct
GAQAGLHVF

SEQ ID NO: 53736 - protein, 9 aa, synthetic construct
GAQAGLRLY

SEQ ID NO: 53737 - protein, 9 aa, synthetic construct
GAQAGLRLR

SEQ ID NO: 53738 - protein, 9 aa, synthetic construct
GAQAGLRLH

SEQ ID NO: 53739 - protein, 9 aa, synthetic construct
GAQAGLRLK

SEQ ID NO: 53740 - protein, 9 aa, synthetic construct
GAQAGLRLF

SEQ ID NO: 53741 - protein, 9 aa, synthetic construct
GAQAGLRVY

SEQ ID NO: 53742 - protein, 9 aa, synthetic construct
GAQAGLRVR

SEQ ID NO: 53743 - protein, 9 aa, synthetic construct
GAQAGLRVH

SEQ ID NO: 53744 - protein, 9 aa, synthetic construct
GAQAGLRVK

SEQ ID NO: 53745 - protein, 9 aa, synthetic construct
GAQAGLKLR

SEQ ID NO: 53746 - protein, 9 aa, synthetic construct
GAQAGLKLK

SEQ ID NO: 53747 - protein, 9 aa, synthetic construct
GAQAGLKVR

SEQ ID NO: 53748 - protein, 9 aa, synthetic construct
GAQAGLKVK

SEQ ID NO: 53749 - protein, 9 aa, synthetic construct
GAQAGARLR

SEQ ID NO: 53750 - protein, 9 aa, synthetic construct
GAQAGARLH

SEQ ID NO: 53751 - protein, 9 aa, synthetic construct
GAQAGARLK

SEQ ID NO: 53752 - protein, 9 aa, synthetic construct
GAQAGARLF

SEQ ID NO: 53753 - protein, 9 aa, synthetic construct
GAQAGARVR

SEQ ID NO: 53754 - protein, 9 aa, synthetic construct
GAQAGARVH

SEQ ID NO: 53755 - protein, 9 aa, synthetic construct
GAQAGARVK

SEQ ID NO: 53756 - protein, 9 aa, synthetic construct
GAQAGAKLY

SEQ ID NO: 53757 - protein, 9 aa, synthetic construct
GAQAGAKLK

SEQ ID NO: 53758 - protein, 9 aa, synthetic construct
GAQAGAKVY

SEQ ID NO: 53759 - protein, 9 aa, synthetic construct
GAQAGAKVR

SEQ ID NO: 53760 - protein, 9 aa, synthetic construct
GAQAGAKVK

SEQ ID NO: 53761 - protein, 9 aa, synthetic construct
GAQAGIHLR

SEQ ID NO: 53762 - protein, 9 aa, synthetic construct
GAQAGIRLK

SEQ ID NO: 53763 - protein, 9 aa, synthetic construct
GAQAGIRVK

SEQ ID NO: 53764 - protein, 9 aa, synthetic construct
GAQAGIKLR

SEQ ID NO: 53765 - protein, 9 aa, synthetic construct
GAQAGIKLK

SEQ ID NO: 53766 - protein, 9 aa, synthetic construct
GAQAGIKVK

SEQ ID NO: 53767 - protein, 9 aa, synthetic construct
GAQAGGHLR

SEQ ID NO: 53768 - protein, 9 aa, synthetic construct
GAQAGGRLR

SEQ ID NO: 53769 - protein, 9 aa, synthetic construct
GAQAGGRLH

SEQ ID NO: 53770 - protein, 9 aa, synthetic construct
GAQAGGRLK

SEQ ID NO: 53771 - protein, 9 aa, synthetic construct
GAQAGGRVK

SEQ ID NO: 53772 - protein, 9 aa, synthetic construct
GAQAGGKLR

SEQ ID NO: 53773 - protein, 9 aa, synthetic construct
GAQAGGKLK

SEQ ID NO: 53774 - protein, 9 aa, synthetic construct
GAQAGGKVR

SEQ ID NO: 53775 - protein, 9 aa, synthetic construct
GAPGAVHVR

SEQ ID NO: 53776 - protein, 9 aa, synthetic construct
GAPGAVHVF

SEQ ID NO: 53777 - protein, 9 aa, synthetic construct
GAPGAVRVR

SEQ ID NO: 53778 - protein, 9 aa, synthetic construct
GAPGAVRVK

SEQ ID NO: 53779 - protein, 9 aa, synthetic construct
GAPGAVKLR

SEQ ID NO: 53780 - protein, 9 aa, synthetic construct
GAPGAVKLK

SEQ ID NO: 53781 - protein, 9 aa, synthetic construct
GAPGAVKVK

SEQ ID NO: 53782 - protein, 9 aa, synthetic construct
GAPGALHLY

SEQ ID NO: 53783 - protein, 9 aa, synthetic construct
GAPGALHLF

SEQ ID NO: 53784 - protein, 9 aa, synthetic construct
GAPGALHVF

SEQ ID NO: 53785 - protein, 9 aa, synthetic construct
GAPGALRLY

SEQ ID NO: 53786 - protein, 9 aa, synthetic construct
GAPGALRLR

SEQ ID NO: 53787 - protein, 9 aa, synthetic construct
GAPGALRLK

SEQ ID NO: 53788 - protein, 9 aa, synthetic construct
GAPGALRLF

SEQ ID NO: 53789 - protein, 9 aa, synthetic construct
GAPGALRVY

SEQ ID NO: 53790 - protein, 9 aa, synthetic construct
GAPGALRVR

SEQ ID NO: 53791 - protein, 9 aa, synthetic construct
GAPGALRVK

SEQ ID NO: 53792 - protein, 9 aa, synthetic construct
GAPGALRVF

SEQ ID NO: 53793 - protein, 9 aa, synthetic construct
GAPGALKLY

SEQ ID NO: 53794 - protein, 9 aa, synthetic construct
GAPGALKLR

SEQ ID NO: 53795 - protein, 9 aa, synthetic construct
GAPGALKVR

SEQ ID NO: 53796 - protein, 9 aa, synthetic construct
GAPGAAHLF

SEQ ID NO: 53797 - protein, 9 aa, synthetic construct
GAPGAAHVR

SEQ ID NO: 53798 - protein, 9 aa, synthetic construct
GAPGAARLF

SEQ ID NO: 53799 - protein, 9 aa, synthetic construct
GAPGAARVY

SEQ ID NO: 53800 - protein, 9 aa, synthetic construct
GAPGAARVR

SEQ ID NO: 53801 - protein, 9 aa, synthetic construct
GAPGAARVF

SEQ ID NO: 53802 - protein, 9 aa, synthetic construct
GAPGAAKLR

SEQ ID NO: 53803 - protein, 9 aa, synthetic construct
GAPGAAKLK

SEQ ID NO: 53804 - protein, 9 aa, synthetic construct
GAPGAAKLF

SEQ ID NO: 53805 - protein, 9 aa, synthetic construct
GAPGAAKVR

SEQ ID NO: 53806 - protein, 9 aa, synthetic construct
GAPGAAKVK

SEQ ID NO: 53807 - protein, 9 aa, synthetic construct
GAPGAIHLY

SEQ ID NO: 53808 - protein, 9 aa, synthetic construct
GAPGAIHLR

SEQ ID NO: 53809 - protein, 9 aa, synthetic construct
GAPGAIHLF

SEQ ID NO: 53810 - protein, 9 aa, synthetic construct
GAPGAIHVR

SEQ ID NO: 53811 - protein, 9 aa, synthetic construct
GAPGAIHVF

SEQ ID NO: 53812 - protein, 9 aa, synthetic construct
GAPGAIRLR

SEQ ID NO: 53813 - protein, 9 aa, synthetic construct
GAPGAIRLK

SEQ ID NO: 53814 - protein, 9 aa, synthetic construct
GAPGAIRLF

SEQ ID NO: 53815 - protein, 9 aa, synthetic construct
GAPGAIRVY

SEQ ID NO: 53816 - protein, 9 aa, synthetic construct
GAPGAIRVR

SEQ ID NO: 53817 - protein, 9 aa, synthetic construct
GAPGAIRVK

SEQ ID NO: 53818 - protein, 9 aa, synthetic construct
GAPGAIRVF

SEQ ID NO: 53819 - protein, 9 aa, synthetic construct
GAPGAIKLY

SEQ ID NO: 53820 - protein, 9 aa, synthetic construct
GAPGAIKLR

SEQ ID NO: 53821 - protein, 9 aa, synthetic construct
GAPGAIKVR

SEQ ID NO: 53822 - protein, 9 aa, synthetic construct
GAPGAIKVF

SEQ ID NO: 53823 - protein, 9 aa, synthetic construct
GAPGAGHLK

SEQ ID NO: 53824 - protein, 9 aa, synthetic construct
GAPGAGHVY

SEQ ID NO: 53825 - protein, 9 aa, synthetic construct
GAPGAGRLR

SEQ ID NO: 53826 - protein, 9 aa, synthetic construct
GAPGAGRLH

SEQ ID NO: 53827 - protein, 9 aa, synthetic construct
GAPGAGRLK

SEQ ID NO: 53828 - protein, 9 aa, synthetic construct
GAPGAGRVK

SEQ ID NO: 53829 - protein, 9 aa, synthetic construct
GAPGAGKLR

SEQ ID NO: 53830 - protein, 9 aa, synthetic construct
GAPGAGKLK

SEQ ID NO: 53831 - protein, 9 aa, synthetic construct
GAPGAGKVY

SEQ ID NO: 53832 - protein, 9 aa, synthetic construct
GAPGTVRLK

SEQ ID NO: 53833 - protein, 9 aa, synthetic construct
GAPGTVRVR

SEQ ID NO: 53834 - protein, 9 aa, synthetic construct
GAPGTLRLK

SEQ ID NO: 53835 - protein, 9 aa, synthetic construct
GAPGTLRVK

SEQ ID NO: 53836 - protein, 9 aa, synthetic construct
GAPGTLRVF

SEQ ID NO: 53837 - protein, 9 aa, synthetic construct
GAPGTLKLK

SEQ ID NO: 53838 - protein, 9 aa, synthetic construct
GAPGTLKVR

SEQ ID NO: 53839 - protein, 9 aa, synthetic construct
GAPGTARVR

SEQ ID NO: 53840 - protein, 9 aa, synthetic construct
GAPGTAKLR

SEQ ID NO: 53841 - protein, 9 aa, synthetic construct
GAPGTAKVR

SEQ ID NO: 53842 - protein, 9 aa, synthetic construct
GAPGTIRLR

SEQ ID NO: 53843 - protein, 9 aa, synthetic construct
GAPGTIRVR

SEQ ID NO: 53844 - protein, 9 aa, synthetic construct
GAPGTIRVK

SEQ ID NO: 53845 - protein, 9 aa, synthetic construct
GAPGTIKLR

SEQ ID NO: 53846 - protein, 9 aa, synthetic construct
GAPGTGRLK

SEQ ID NO: 53847 - protein, 9 aa, synthetic construct
GAPGTGKLR

SEQ ID NO: 53848 - protein, 9 aa, synthetic construct
GAPGSVHVH

SEQ ID NO: 53849 - protein, 9 aa, synthetic construct
GAPGSVRLK

SEQ ID NO: 53850 - protein, 9 aa, synthetic construct
GAPGSVRVK

SEQ ID NO: 53851 - protein, 9 aa, synthetic construct
GAPGSVKLR

SEQ ID NO: 53852 - protein, 9 aa, synthetic construct
GAPGSVKLK

SEQ ID NO: 53853 - protein, 9 aa, synthetic construct
GAPGSVKVR

SEQ ID NO: 53854 - protein, 9 aa, synthetic construct
GAPGSLHVY

SEQ ID NO: 53855 - protein, 9 aa, synthetic construct
GAPGSLRLR

SEQ ID NO: 53856 - protein, 9 aa, synthetic construct
GAPGSLRLK

SEQ ID NO: 53857 - protein, 9 aa, synthetic construct
GAPGSLRVR

SEQ ID NO: 53858 - protein, 9 aa, synthetic construct
GAPGSLRVH

SEQ ID NO: 53859 - protein, 9 aa, synthetic construct
GAPGSLRVK

SEQ ID NO: 53860 - protein, 9 aa, synthetic construct
GAPGSLKLY

SEQ ID NO: 53861 - protein, 9 aa, synthetic construct
GAPGSLKLR

SEQ ID NO: 53862 - protein, 9 aa, synthetic construct
GAPGSLKLK

SEQ ID NO: 53863 - protein, 9 aa, synthetic construct
GAPGSLKLF

SEQ ID NO: 53864 - protein, 9 aa, synthetic construct
GAPGSLKVR

SEQ ID NO: 53865 - protein, 9 aa, synthetic construct
GAPGSARLR

SEQ ID NO: 53866 - protein, 9 aa, synthetic construct
GAPGSARVR

SEQ ID NO: 53867 - protein, 9 aa, synthetic construct
GAPGSAKLR

SEQ ID NO: 53868 - protein, 9 aa, synthetic construct
GAPGSAKLK

SEQ ID NO: 53869 - protein, 9 aa, synthetic construct
GAPGSIRLK

SEQ ID NO: 53870 - protein, 9 aa, synthetic construct
GAPGSIKLR

SEQ ID NO: 53871 - protein, 9 aa, synthetic construct
GAPGSGRLR

SEQ ID NO: 53872 - protein, 9 aa, synthetic construct
GAPGSGRLK

SEQ ID NO: 53873 - protein, 9 aa, synthetic construct
GAPGSGKLK

SEQ ID NO: 53874 - protein, 9 aa, synthetic construct
GAPGVVRVR

SEQ ID NO: 53875 - protein, 9 aa, synthetic construct
GAPGVVRVK

SEQ ID NO: 53876 - protein, 9 aa, synthetic construct
GAPGVVKLK

SEQ ID NO: 53877 - protein, 9 aa, synthetic construct
GAPGVVKVR

SEQ ID NO: 53878 - protein, 9 aa, synthetic construct
GAPGVLHLR

SEQ ID NO: 53879 - protein, 9 aa, synthetic construct
GAPGVLRLR

SEQ ID NO: 53880 - protein, 9 aa, synthetic construct
GAPGVLRLH

SEQ ID NO: 53881 - protein, 9 aa, synthetic construct
GAPGVLRLK

SEQ ID NO: 53882 - protein, 9 aa, synthetic construct
GAPGVLRVR

SEQ ID NO: 53883 - protein, 9 aa, synthetic construct
GAPGVLKLK

SEQ ID NO: 53884 - protein, 9 aa, synthetic construct
GAPGVLKVK

SEQ ID NO: 53885 - protein, 9 aa, synthetic construct
GAPGVARLR

SEQ ID NO: 53886 - protein, 9 aa, synthetic construct
GAPGVARLK

SEQ ID NO: 53887 - protein, 9 aa, synthetic construct
GAPGVARVK

SEQ ID NO: 53888 - protein, 9 aa, synthetic construct
GAPGVAKLK

SEQ ID NO: 53889 - protein, 9 aa, synthetic construct
GAPGVIRLK

SEQ ID NO: 53890 - protein, 9 aa, synthetic construct
GAPGVIKLR

SEQ ID NO: 53891 - protein, 9 aa, synthetic construct
GAPGVIKVR

SEQ ID NO: 53892 - protein, 9 aa, synthetic construct
GAPGVGRLR

SEQ ID NO: 53893 - protein, 9 aa, synthetic construct
GAPGVGRLK

SEQ ID NO: 53894 - protein, 9 aa, synthetic construct
GAPGVGKLR

SEQ ID NO: 53895 - protein, 9 aa, synthetic construct
GAPGVGKVR

SEQ ID NO: 53896 - protein, 9 aa, synthetic construct
GAPGVGKVK

SEQ ID NO: 53897 - protein, 9 aa, synthetic construct
GAPGGVHVH

SEQ ID NO: 53898 - protein, 9 aa, synthetic construct
GAPGGLHLY

SEQ ID NO: 53899 - protein, 9 aa, synthetic construct
GAPGGLHLR

SEQ ID NO: 53900 - protein, 9 aa, synthetic construct
GAPGGLHLK

SEQ ID NO: 53901 - protein, 9 aa, synthetic construct
GAPGGLHLF

SEQ ID NO: 53902 - protein, 9 aa, synthetic construct
GAPGGLHVY

SEQ ID NO: 53903 - protein, 9 aa, synthetic construct
GAPGGLHVF

SEQ ID NO: 53904 - protein, 9 aa, synthetic construct
GAPGGLRLR

SEQ ID NO: 53905 - protein, 9 aa, synthetic construct
GAPGGLRLH

SEQ ID NO: 53906 - protein, 9 aa, synthetic construct
GAPGGLRLK

SEQ ID NO: 53907 - protein, 9 aa, synthetic construct
GAPGGLRLF

SEQ ID NO: 53908 - protein, 9 aa, synthetic construct
GAPGGLRVY

SEQ ID NO: 53909 - protein, 9 aa, synthetic construct
GAPGGLRVR

SEQ ID NO: 53910 - protein, 9 aa, synthetic construct
GAPGGLRVH

SEQ ID NO: 53911 - protein, 9 aa, synthetic construct
GAPGGLRVK

SEQ ID NO: 53912 - protein, 9 aa, synthetic construct
GAPGGLRVF

SEQ ID NO: 53913 - protein, 9 aa, synthetic construct
GAPGGLKLR

SEQ ID NO: 53914 - protein, 9 aa, synthetic construct
GAPGGLKLH

SEQ ID NO: 53915 - protein, 9 aa, synthetic construct
GAPGGLKLK

SEQ ID NO: 53916 - protein, 9 aa, synthetic construct
GAPGGLKVK

SEQ ID NO: 53917 - protein, 9 aa, synthetic construct
GAPGGAHLR

SEQ ID NO: 53918 - protein, 9 aa, synthetic construct
GAPGGAHLF

SEQ ID NO: 53919 - protein, 9 aa, synthetic construct
GAPGGAHVY

SEQ ID NO: 53920 - protein, 9 aa, synthetic construct
GAPGGAHVK

SEQ ID NO: 53921 - protein, 9 aa, synthetic construct
GAPGGARLR

SEQ ID NO: 53922 - protein, 9 aa, synthetic construct
GAPGGARLH

SEQ ID NO: 53923 - protein, 9 aa, synthetic construct
GAPGGARLK

SEQ ID NO: 53924 - protein, 9 aa, synthetic construct
GAPGGARLF

SEQ ID NO: 53925 - protein, 9 aa, synthetic construct
GAPGGARVR

SEQ ID NO: 53926 - protein, 9 aa, synthetic construct
GAPGGARVK

SEQ ID NO: 53927 - protein, 9 aa, synthetic construct
GAPGGAKLR

SEQ ID NO: 53928 - protein, 9 aa, synthetic construct
GAPGGAKLK

SEQ ID NO: 53929 - protein, 9 aa, synthetic construct
GAPGGAKVY

SEQ ID NO: 53930 - protein, 9 aa, synthetic construct
GAPGGAKVK

SEQ ID NO: 53931 - protein, 9 aa, synthetic construct
GAPGGIRLR

SEQ ID NO: 53932 - protein, 9 aa, synthetic construct
GAPGGIRLK

SEQ ID NO: 53933 - protein, 9 aa, synthetic construct
GAPGGGRVR

SEQ ID NO: 53934 - protein, 9 aa, synthetic construct
GAPAAVRLR

SEQ ID NO: 53935 - protein, 9 aa, synthetic construct
GAPAAVKVR

SEQ ID NO: 53936 - protein, 9 aa, synthetic construct
GAPAALHLR

SEQ ID NO: 53937 - protein, 9 aa, synthetic construct
GAPAALHLF

SEQ ID NO: 53938 - protein, 9 aa, synthetic construct
GAPAALRLY

SEQ ID NO: 53939 - protein, 9 aa, synthetic construct
GAPAALRLR

SEQ ID NO: 53940 - protein, 9 aa, synthetic construct
GAPAALRLK

SEQ ID NO: 53941 - protein, 9 aa, synthetic construct
GAPAALRVR

SEQ ID NO: 53942 - protein, 9 aa, synthetic construct
GAPAALRVK

SEQ ID NO: 53943 - protein, 9 aa, synthetic construct
GAPAALKLK

SEQ ID NO: 53944 - protein, 9 aa, synthetic construct
GAPAALKLF

SEQ ID NO: 53945 - protein, 9 aa, synthetic construct
GAPAALKVR

SEQ ID NO: 53946 - protein, 9 aa, synthetic construct
GAPAAGRLR

SEQ ID NO: 53947 - protein, 9 aa, synthetic construct
GAPATVRLK

SEQ ID NO: 53948 - protein, 9 aa, synthetic construct
GAPATVRVR

SEQ ID NO: 53949 - protein, 9 aa, synthetic construct
GAPATVRVK

SEQ ID NO: 53950 - protein, 9 aa, synthetic construct
GAPATVKVR

SEQ ID NO: 53951 - protein, 9 aa, synthetic construct
GAPATLHVY

SEQ ID NO: 53952 - protein, 9 aa, synthetic construct
GAPATLRLR

SEQ ID NO: 53953 - protein, 9 aa, synthetic construct
GAPATLRLK

SEQ ID NO: 53954 - protein, 9 aa, synthetic construct
GAPATLRVY

SEQ ID NO: 53955 - protein, 9 aa, synthetic construct
GAPATLRVR

SEQ ID NO: 53956 - protein, 9 aa, synthetic construct
GAPATLRVF

SEQ ID NO: 53957 - protein, 9 aa, synthetic construct
GAPATLKLR

SEQ ID NO: 53958 - protein, 9 aa, synthetic construct
GAPATLKLK

SEQ ID NO: 53959 - protein, 9 aa, synthetic construct
GAPATARLR

SEQ ID NO: 53960 - protein, 9 aa, synthetic construct
GAPATARVR

SEQ ID NO: 53961 - protein, 9 aa, synthetic construct
GAPATARVK

SEQ ID NO: 53962 - protein, 9 aa, synthetic construct
GAPATIRLK

SEQ ID NO: 53963 - protein, 9 aa, synthetic construct
GAPATIRVK

SEQ ID NO: 53964 - protein, 9 aa, synthetic construct
GAPATIKLK

SEQ ID NO: 53965 - protein, 9 aa, synthetic construct
GAPATGRLR

SEQ ID NO: 53966 - protein, 9 aa, synthetic construct
GAPATGRVK

SEQ ID NO: 53967 - protein, 9 aa, synthetic construct
GAPATGKLR

SEQ ID NO: 53968 - protein, 9 aa, synthetic construct
GAPATGKVK

SEQ ID NO: 53969 - protein, 9 aa, synthetic construct
GAPASVHVH

SEQ ID NO: 53970 - protein, 9 aa, synthetic construct
GAPASVRLR

SEQ ID NO: 53971 - protein, 9 aa, synthetic construct
GAPASVRLK

SEQ ID NO: 53972 - protein, 9 aa, synthetic construct
GAPASVKLK

SEQ ID NO: 53973 - protein, 9 aa, synthetic construct
GAPASVKVR

SEQ ID NO: 53974 - protein, 9 aa, synthetic construct
GAPASLHLR

SEQ ID NO: 53975 - protein, 9 aa, synthetic construct
GAPASLRLY

SEQ ID NO: 53976 - protein, 9 aa, synthetic construct
GAPASLRLR

SEQ ID NO: 53977 - protein, 9 aa, synthetic construct
GAPASLRLK

SEQ ID NO: 53978 - protein, 9 aa, synthetic construct
GAPASLRLF

SEQ ID NO: 53979 - protein, 9 aa, synthetic construct
GAPASLRVY

SEQ ID NO: 53980 - protein, 9 aa, synthetic construct
GAPASLRVK

SEQ ID NO: 53981 - protein, 9 aa, synthetic construct
GAPASLKLK

SEQ ID NO: 53982 - protein, 9 aa, synthetic construct
GAPASLKLF

SEQ ID NO: 53983 - protein, 9 aa, synthetic construct
GAPASLKVR

SEQ ID NO: 53984 - protein, 9 aa, synthetic construct
GAPASARLR

SEQ ID NO: 53985 - protein, 9 aa, synthetic construct
GAPASARLK

SEQ ID NO: 53986 - protein, 9 aa, synthetic construct
GAPASARVK

SEQ ID NO: 53987 - protein, 9 aa, synthetic construct
GAPASAKLK

SEQ ID NO: 53988 - protein, 9 aa, synthetic construct
GAPASAKVR

SEQ ID NO: 53989 - protein, 9 aa, synthetic construct
GAPASIRLY

SEQ ID NO: 53990 - protein, 9 aa, synthetic construct
GAPASIRLR

SEQ ID NO: 53991 - protein, 9 aa, synthetic construct
GAPASIRVR

SEQ ID NO: 53992 - protein, 9 aa, synthetic construct
GAPASIRVK

SEQ ID NO: 53993 - protein, 9 aa, synthetic construct
GAPASIKVR

SEQ ID NO: 53994 - protein, 9 aa, synthetic construct
GAPAVVHLF

SEQ ID NO: 53995 - protein, 9 aa, synthetic construct
GAPAVVRLY

SEQ ID NO: 53996 - protein, 9 aa, synthetic construct
GAPAVVRLR

SEQ ID NO: 53997 - protein, 9 aa, synthetic construct
GAPAVVRVY

SEQ ID NO: 53998 - protein, 9 aa, synthetic construct
GAPAVVKLR

SEQ ID NO: 53999 - protein, 9 aa, synthetic construct
GAPAVVKLK

SEQ ID NO: 54000 - protein, 9 aa, synthetic construct
GAPAVLHLY

SEQ ID NO: 54001 - protein, 9 aa, synthetic construct
GAPAVLHLR

SEQ ID NO: 54002 - protein, 9 aa, synthetic construct
GAPAVLHLH

SEQ ID NO: 54003 - protein, 9 aa, synthetic construct
GAPAVLHLK

SEQ ID NO: 54004 - protein, 9 aa, synthetic construct
GAPAVLHLF

SEQ ID NO: 54005 - protein, 9 aa, synthetic construct
GAPAVLHVY

SEQ ID NO: 54006 - protein, 9 aa, synthetic construct
GAPAVLHVR

SEQ ID NO: 54007 - protein, 9 aa, synthetic construct
GAPAVLRLY

SEQ ID NO: 54008 - protein, 9 aa, synthetic construct
GAPAVLRLR

SEQ ID NO: 54009 - protein, 9 aa, synthetic construct
GAPAVLRLF

SEQ ID NO: 54010 - protein, 9 aa, synthetic construct
GAPAVLRVR

SEQ ID NO: 54011 - protein, 9 aa, synthetic construct
GAPAVLRVK

SEQ ID NO: 54012 - protein, 9 aa, synthetic construct
GAPAVLKLR

SEQ ID NO: 54013 - protein, 9 aa, synthetic construct
GAPAVLKLK

SEQ ID NO: 54014 - protein, 9 aa, synthetic construct
GAPAVLKVR

SEQ ID NO: 54015 - protein, 9 aa, synthetic construct
GAPAVARLR

SEQ ID NO: 54016 - protein, 9 aa, synthetic construct
GAPAVARVY

SEQ ID NO: 54017 - protein, 9 aa, synthetic construct
GAPAVARVR

SEQ ID NO: 54018 - protein, 9 aa, synthetic construct
GAPAVARVK

SEQ ID NO: 54019 - protein, 9 aa, synthetic construct
GAPAVAKLR

SEQ ID NO: 54020 - protein, 9 aa, synthetic construct
GAPAVAKLK

SEQ ID NO: 54021 - protein, 9 aa, synthetic construct
GAPAVAKVY

SEQ ID NO: 54022 - protein, 9 aa, synthetic construct
GAPAVAKVK

SEQ ID NO: 54023 - protein, 9 aa, synthetic construct
GAPAVIRLY

SEQ ID NO: 54024 - protein, 9 aa, synthetic construct
GAPAVIKLR

SEQ ID NO: 54025 - protein, 9 aa, synthetic construct
GAPAVIKVK

SEQ ID NO: 54026 - protein, 9 aa, synthetic construct
GAPAVGHLF

SEQ ID NO: 54027 - protein, 9 aa, synthetic construct
GAPAVGRLR

SEQ ID NO: 54028 - protein, 9 aa, synthetic construct
GAPAVGRLK

SEQ ID NO: 54029 - protein, 9 aa, synthetic construct
GAPAVGRVR

SEQ ID NO: 54030 - protein, 9 aa, synthetic construct
GAPAVGKLR

SEQ ID NO: 54031 - protein, 9 aa, synthetic construct
GAPAGVHLY

SEQ ID NO: 54032 - protein, 9 aa, synthetic construct
GAPAGVHLH

SEQ ID NO: 54033 - protein, 9 aa, synthetic construct
GAPAGVHLF

SEQ ID NO: 54034 - protein, 9 aa, synthetic construct
GAPAGVHVH

SEQ ID NO: 54035 - protein, 9 aa, synthetic construct
GAPAGVRLK

SEQ ID NO: 54036 - protein, 9 aa, synthetic construct
GAPAGVRVR

SEQ ID NO: 54037 - protein, 9 aa, synthetic construct
GAPAGVKLR

SEQ ID NO: 54038 - protein, 9 aa, synthetic construct
GAPAGVKLK

SEQ ID NO: 54039 - protein, 9 aa, synthetic construct
GAPAGVKVR

SEQ ID NO: 54040 - protein, 9 aa, synthetic construct
GAPAGLHLY

SEQ ID NO: 54041 - protein, 9 aa, synthetic construct
GAPAGLHLR

SEQ ID NO: 54042 - protein, 9 aa, synthetic construct
GAPAGLHLH

SEQ ID NO: 54043 - protein, 9 aa, synthetic construct
GAPAGLHLK

SEQ ID NO: 54044 - protein, 9 aa, synthetic construct
GAPAGLHLF

SEQ ID NO: 54045 - protein, 9 aa, synthetic construct
GAPAGLHVY

SEQ ID NO: 54046 - protein, 9 aa, synthetic construct
GAPAGLHVR

SEQ ID NO: 54047 - protein, 9 aa, synthetic construct
GAPAGLHVH

SEQ ID NO: 54048 - protein, 9 aa, synthetic construct
GAPAGLHVK

SEQ ID NO: 54049 - protein, 9 aa, synthetic construct
GAPAGLHVF

SEQ ID NO: 54050 - protein, 9 aa, synthetic construct
GAPAGLRLY

SEQ ID NO: 54051 - protein, 9 aa, synthetic construct
GAPAGLRLR

SEQ ID NO: 54052 - protein, 9 aa, synthetic construct
GAPAGLRLH

SEQ ID NO: 54053 - protein, 9 aa, synthetic construct
GAPAGLRLK

SEQ ID NO: 54054 - protein, 9 aa, synthetic construct
GAPAGLRLF

SEQ ID NO: 54055 - protein, 9 aa, synthetic construct
GAPAGLRVY

SEQ ID NO: 54056 - protein, 9 aa, synthetic construct
GAPAGLRVR

SEQ ID NO: 54057 - protein, 9 aa, synthetic construct
GAPAGLRVK

SEQ ID NO: 54058 - protein, 9 aa, synthetic construct
GAPAGLKLY

SEQ ID NO: 54059 - protein, 9 aa, synthetic construct
GAPAGLKLR

SEQ ID NO: 54060 - protein, 9 aa, synthetic construct
GAPAGLKLH

SEQ ID NO: 54061 - protein, 9 aa, synthetic construct
GAPAGLKLK

SEQ ID NO: 54062 - protein, 9 aa, synthetic construct
GAPAGLKLF

SEQ ID NO: 54063 - protein, 9 aa, synthetic construct
GAPAGLKVR

SEQ ID NO: 54064 - protein, 9 aa, synthetic construct
GAPAGLKVH

SEQ ID NO: 54065 - protein, 9 aa, synthetic construct
GAPAGAHLY

SEQ ID NO: 54066 - protein, 9 aa, synthetic construct
GAPAGAHLR

SEQ ID NO: 54067 - protein, 9 aa, synthetic construct
GAPAGAHLH

SEQ ID NO: 54068 - protein, 9 aa, synthetic construct
GAPAGAHVY

SEQ ID NO: 54069 - protein, 9 aa, synthetic construct
GAPAGAHVR

SEQ ID NO: 54070 - protein, 9 aa, synthetic construct
GAPAGARLY

SEQ ID NO: 54071 - protein, 9 aa, synthetic construct
GAPAGARLR

SEQ ID NO: 54072 - protein, 9 aa, synthetic construct
GAPAGARLK

SEQ ID NO: 54073 - protein, 9 aa, synthetic construct
GAPAGARVR

SEQ ID NO: 54074 - protein, 9 aa, synthetic construct
GAPAGAKLK

SEQ ID NO: 54075 - protein, 9 aa, synthetic construct
GAPAGAKLF

SEQ ID NO: 54076 - protein, 9 aa, synthetic construct
GAPAGAKVR

SEQ ID NO: 54077 - protein, 9 aa, synthetic construct
GAPAGAKVK

SEQ ID NO: 54078 - protein, 9 aa, synthetic construct
GAPAGIHLR

SEQ ID NO: 54079 - protein, 9 aa, synthetic construct
GAPAGIHVH

SEQ ID NO: 54080 - protein, 9 aa, synthetic construct
GAPAGIRLY

SEQ ID NO: 54081 - protein, 9 aa, synthetic construct
GAPAGIRLR

SEQ ID NO: 54082 - protein, 9 aa, synthetic construct
GAPAGIRLH

SEQ ID NO: 54083 - protein, 9 aa, synthetic construct
GAPAGIRLK

SEQ ID NO: 54084 - protein, 9 aa, synthetic construct
GAPAGIRVK

SEQ ID NO: 54085 - protein, 9 aa, synthetic construct
GAPAGIKLR

SEQ ID NO: 54086 - protein, 9 aa, synthetic construct
GAPAGIKLK

SEQ ID NO: 54087 - protein, 9 aa, synthetic construct
GAPAGIKVK

SEQ ID NO: 54088 - protein, 9 aa, synthetic construct
GAPAGGHLY

SEQ ID NO: 54089 - protein, 9 aa, synthetic construct
GAPAGGHLR

SEQ ID NO: 54090 - protein, 9 aa, synthetic construct
GAPAGGRLR

SEQ ID NO: 54091 - protein, 9 aa, synthetic construct
GAPAGGRLK

SEQ ID NO: 54092 - protein, 9 aa, synthetic construct
GAPAGGKLR

SEQ ID NO: 54093 - protein, 9 aa, synthetic construct
GAPAGGKLK

SEQ ID NO: 54094 - protein, 9 aa, synthetic construct
GVNGAVRLR

SEQ ID NO: 54095 - protein, 9 aa, synthetic construct
GVNGAVRLK

SEQ ID NO: 54096 - protein, 9 aa, synthetic construct
GVNGAVRVR

SEQ ID NO: 54097 - protein, 9 aa, synthetic construct
GVNGAVKLR

SEQ ID NO: 54098 - protein, 9 aa, synthetic construct
GVNGALRLR

SEQ ID NO: 54099 - protein, 9 aa, synthetic construct
GVNGALRLK

SEQ ID NO: 54100 - protein, 9 aa, synthetic construct
GVNGALRVR

SEQ ID NO: 54101 - protein, 9 aa, synthetic construct
GVNGALKLK

SEQ ID NO: 54102 - protein, 9 aa, synthetic construct
GVNGALKVR

SEQ ID NO: 54103 - protein, 9 aa, synthetic construct
GVNGAIRVR

SEQ ID NO: 54104 - protein, 9 aa, synthetic construct
GVNGAIKLR

SEQ ID NO: 54105 - protein, 9 aa, synthetic construct
GVNGAIKLK

SEQ ID NO: 54106 - protein, 9 aa, synthetic construct
GVNGAGRLR

SEQ ID NO: 54107 - protein, 9 aa, synthetic construct
GVNGAGRLK

SEQ ID NO: 54108 - protein, 9 aa, synthetic construct
GVNGAGKLK

SEQ ID NO: 54109 - protein, 9 aa, synthetic construct
GVNGTVRLR

SEQ ID NO: 54110 - protein, 9 aa, synthetic construct
GVNGTVRVR

SEQ ID NO: 54111 - protein, 9 aa, synthetic construct
GVNGTVRVK

SEQ ID NO: 54112 - protein, 9 aa, synthetic construct
GVNGTLRVR

SEQ ID NO: 54113 - protein, 9 aa, synthetic construct
GVNGTLRVK

SEQ ID NO: 54114 - protein, 9 aa, synthetic construct
GVNGTARLR

SEQ ID NO: 54115 - protein, 9 aa, synthetic construct
GVNGTAKLK

SEQ ID NO: 54116 - protein, 9 aa, synthetic construct
GVNGTIRVR

SEQ ID NO: 54117 - protein, 9 aa, synthetic construct
GVNGTIKLK

SEQ ID NO: 54118 - protein, 9 aa, synthetic construct
GVNGTIKVR

SEQ ID NO: 54119 - protein, 9 aa, synthetic construct
GVNGTIKVK

SEQ ID NO: 54120 - protein, 9 aa, synthetic construct
GVNGTGKLR

SEQ ID NO: 54121 - protein, 9 aa, synthetic construct
GVNGTGKVR

SEQ ID NO: 54122 - protein, 9 aa, synthetic construct
GVNGSVHVH

SEQ ID NO: 54123 - protein, 9 aa, synthetic construct
GVNGSVRLK

SEQ ID NO: 54124 - protein, 9 aa, synthetic construct
GVNGSVRVR

SEQ ID NO: 54125 - protein, 9 aa, synthetic construct
GVNGSLRLY

SEQ ID NO: 54126 - protein, 9 aa, synthetic construct
GVNGSLRLR

SEQ ID NO: 54127 - protein, 9 aa, synthetic construct
GVNGSLRLH

SEQ ID NO: 54128 - protein, 9 aa, synthetic construct
GVNGSLRLK

SEQ ID NO: 54129 - protein, 9 aa, synthetic construct
GVNGSLRVR

SEQ ID NO: 54130 - protein, 9 aa, synthetic construct
GVNGSLRVK

SEQ ID NO: 54131 - protein, 9 aa, synthetic construct
GVNGSLKLR

SEQ ID NO: 54132 - protein, 9 aa, synthetic construct
GVNGSLKLK

SEQ ID NO: 54133 - protein, 9 aa, synthetic construct
GVNGSARLR

SEQ ID NO: 54134 - protein, 9 aa, synthetic construct
GVNGSARVR

SEQ ID NO: 54135 - protein, 9 aa, synthetic construct
GVNGSARVK

SEQ ID NO: 54136 - protein, 9 aa, synthetic construct
GVNGSAKVR

SEQ ID NO: 54137 - protein, 9 aa, synthetic construct
GVNGSIRLR

SEQ ID NO: 54138 - protein, 9 aa, synthetic construct
GVNGSIRLK

SEQ ID NO: 54139 - protein, 9 aa, synthetic construct
GVNGSGRLR

SEQ ID NO: 54140 - protein, 9 aa, synthetic construct
GVNGSGRVR

SEQ ID NO: 54141 - protein, 9 aa, synthetic construct
GVNGSGKLK

SEQ ID NO: 54142 - protein, 9 aa, synthetic construct
GVNGVVRLR

SEQ ID NO: 54143 - protein, 9 aa, synthetic construct
GVNGVVRVR

SEQ ID NO: 54144 - protein, 9 aa, synthetic construct
GVNGVVKVK

SEQ ID NO: 54145 - protein, 9 aa, synthetic construct
GVNGVLHLY

SEQ ID NO: 54146 - protein, 9 aa, synthetic construct
GVNGVLRVK

SEQ ID NO: 54147 - protein, 9 aa, synthetic construct
GVNGVLKLK

SEQ ID NO: 54148 - protein, 9 aa, synthetic construct
GVNGVARLH

SEQ ID NO: 54149 - protein, 9 aa, synthetic construct
GVNGVARLK

SEQ ID NO: 54150 - protein, 9 aa, synthetic construct
GVNGVARVR

SEQ ID NO: 54151 - protein, 9 aa, synthetic construct
GVNGVARVK

SEQ ID NO: 54152 - protein, 9 aa, synthetic construct
GVNGVAKLR

SEQ ID NO: 54153 - protein, 9 aa, synthetic construct
GVNGVAKLK

SEQ ID NO: 54154 - protein, 9 aa, synthetic construct
GVNGVAKVK

SEQ ID NO: 54155 - protein, 9 aa, synthetic construct
GVNGVIHLY

SEQ ID NO: 54156 - protein, 9 aa, synthetic construct
GVNGVIHLF

SEQ ID NO: 54157 - protein, 9 aa, synthetic construct
GVNGVIRVY

SEQ ID NO: 54158 - protein, 9 aa, synthetic construct
GVNGVIKLR

SEQ ID NO: 54159 - protein, 9 aa, synthetic construct
GVNGVIKVR

SEQ ID NO: 54160 - protein, 9 aa, synthetic construct
GVNGVGRLK

SEQ ID NO: 54161 - protein, 9 aa, synthetic construct
GVNGVGKVR

SEQ ID NO: 54162 - protein, 9 aa, synthetic construct
GVNGVGKVK

SEQ ID NO: 54163 - protein, 9 aa, synthetic construct
GVNGGVHVH

SEQ ID NO: 54164 - protein, 9 aa, synthetic construct
GVNGGVRLR

SEQ ID NO: 54165 - protein, 9 aa, synthetic construct
GVNGGLRLY

SEQ ID NO: 54166 - protein, 9 aa, synthetic construct
GVNGGLRLR

SEQ ID NO: 54167 - protein, 9 aa, synthetic construct
GVNGGLRLK

SEQ ID NO: 54168 - protein, 9 aa, synthetic construct
GVNGGLRVR

SEQ ID NO: 54169 - protein, 9 aa, synthetic construct
GVNGGLRVH

SEQ ID NO: 54170 - protein, 9 aa, synthetic construct
GVNGGLRVK

SEQ ID NO: 54171 - protein, 9 aa, synthetic construct
GVNGGLRVF

SEQ ID NO: 54172 - protein, 9 aa, synthetic construct
GVNGGLKLR

SEQ ID NO: 54173 - protein, 9 aa, synthetic construct
GVNGGLKLK

SEQ ID NO: 54174 - protein, 9 aa, synthetic construct
GVNGGLKVK

SEQ ID NO: 54175 - protein, 9 aa, synthetic construct
GVNGGAKLK

SEQ ID NO: 54176 - protein, 9 aa, synthetic construct
GVNGGIKVK

SEQ ID NO: 54177 - protein, 9 aa, synthetic construct
GVNGGGKLR

SEQ ID NO: 54178 - protein, 9 aa, synthetic construct
GVNAAVRLR

SEQ ID NO: 54179 - protein, 9 aa, synthetic construct
GVNAAVRLK

SEQ ID NO: 54180 - protein, 9 aa, synthetic construct
GVNAALRLR

SEQ ID NO: 54181 - protein, 9 aa, synthetic construct
GVNAALRLK

SEQ ID NO: 54182 - protein, 9 aa, synthetic construct
GVNAAARLR

SEQ ID NO: 54183 - protein, 9 aa, synthetic construct
GVNAAIRVR

SEQ ID NO: 54184 - protein, 9 aa, synthetic construct
GVNAAIRVK

SEQ ID NO: 54185 - protein, 9 aa, synthetic construct
GVNAAGHVR

SEQ ID NO: 54186 - protein, 9 aa, synthetic construct
GVNAAGRLR

SEQ ID NO: 54187 - protein, 9 aa, synthetic construct
GVNAAGKVK

SEQ ID NO: 54188 - protein, 9 aa, synthetic construct
GVNATVHVY

SEQ ID NO: 54189 - protein, 9 aa, synthetic construct
GVNATVRLR

SEQ ID NO: 54190 - protein, 9 aa, synthetic construct
GVNATVRLK

SEQ ID NO: 54191 - protein, 9 aa, synthetic construct
GVNATVRVR

SEQ ID NO: 54192 - protein, 9 aa, synthetic construct
GVNATVRVK

SEQ ID NO: 54193 - protein, 9 aa, synthetic construct
GVNATLHLH

SEQ ID NO: 54194 - protein, 9 aa, synthetic construct
GVNATLRLY

SEQ ID NO: 54195 - protein, 9 aa, synthetic construct
GVNATLRLR

SEQ ID NO: 54196 - protein, 9 aa, synthetic construct
GVNATLRLH

SEQ ID NO: 54197 - protein, 9 aa, synthetic construct
GVNATLRLK

SEQ ID NO: 54198 - protein, 9 aa, synthetic construct
GVNATLRLF

SEQ ID NO: 54199 - protein, 9 aa, synthetic construct
GVNATLRVY

SEQ ID NO: 54200 - protein, 9 aa, synthetic construct
GVNATLRVR

SEQ ID NO: 54201 - protein, 9 aa, synthetic construct
GVNATLRVH

SEQ ID NO: 54202 - protein, 9 aa, synthetic construct
GVNATLRVK

SEQ ID NO: 54203 - protein, 9 aa, synthetic construct
GVNATLRVF

SEQ ID NO: 54204 - protein, 9 aa, synthetic construct
GVNATLKLK

SEQ ID NO: 54205 - protein, 9 aa, synthetic construct
GVNATLKVR

SEQ ID NO: 54206 - protein, 9 aa, synthetic construct
GVNATLKVK

SEQ ID NO: 54207 - protein, 9 aa, synthetic construct
GVNATARLR

SEQ ID NO: 54208 - protein, 9 aa, synthetic construct
GVNATARLK

SEQ ID NO: 54209 - protein, 9 aa, synthetic construct
GVNATAKVR

SEQ ID NO: 54210 - protein, 9 aa, synthetic construct
GVNATIHLY

SEQ ID NO: 54211 - protein, 9 aa, synthetic construct
GVNATIHVF

SEQ ID NO: 54212 - protein, 9 aa, synthetic construct
GVNATIRLR

SEQ ID NO: 54213 - protein, 9 aa, synthetic construct
GVNATIRLK

SEQ ID NO: 54214 - protein, 9 aa, synthetic construct
GVNATIRVR

SEQ ID NO: 54215 - protein, 9 aa, synthetic construct
GVNATIKLF

SEQ ID NO: 54216 - protein, 9 aa, synthetic construct
GVNATIKVR

SEQ ID NO: 54217 - protein, 9 aa, synthetic construct
GVNATGRLR

SEQ ID NO: 54218 - protein, 9 aa, synthetic construct
GVNATGKVR

SEQ ID NO: 54219 - protein, 9 aa, synthetic construct
GVNATGKVK

SEQ ID NO: 54220 - protein, 9 aa, synthetic construct
GVNASVHLH

SEQ ID NO: 54221 - protein, 9 aa, synthetic construct
GVNASVRLR

SEQ ID NO: 54222 - protein, 9 aa, synthetic construct
GVNASVRLK

SEQ ID NO: 54223 - protein, 9 aa, synthetic construct
GVNASLRLR

SEQ ID NO: 54224 - protein, 9 aa, synthetic construct
GVNASLRLK

SEQ ID NO: 54225 - protein, 9 aa, synthetic construct
GVNASLRVY

SEQ ID NO: 54226 - protein, 9 aa, synthetic construct
GVNASLRVR

SEQ ID NO: 54227 - protein, 9 aa, synthetic construct
GVNASLRVK

SEQ ID NO: 54228 - protein, 9 aa, synthetic construct
GVNASLKLK

SEQ ID NO: 54229 - protein, 9 aa, synthetic construct
GVNASLKVR

SEQ ID NO: 54230 - protein, 9 aa, synthetic construct
GVNASLKVK

SEQ ID NO: 54231 - protein, 9 aa, synthetic construct
GVNASARLR

SEQ ID NO: 54232 - protein, 9 aa, synthetic construct
GVNASARVR

SEQ ID NO: 54233 - protein, 9 aa, synthetic construct
GVNASARVK

SEQ ID NO: 54234 - protein, 9 aa, synthetic construct
GVNASAKLK

SEQ ID NO: 54235 - protein, 9 aa, synthetic construct
GVNASAKVR

SEQ ID NO: 54236 - protein, 9 aa, synthetic construct
GVNASAKVK

SEQ ID NO: 54237 - protein, 9 aa, synthetic construct
GVNASIHLF

SEQ ID NO: 54238 - protein, 9 aa, synthetic construct
GVNASIRLR

SEQ ID NO: 54239 - protein, 9 aa, synthetic construct
GVNASIRVY

SEQ ID NO: 54240 - protein, 9 aa, synthetic construct
GVNASGRLK

SEQ ID NO: 54241 - protein, 9 aa, synthetic construct
GVNASGRVR

SEQ ID NO: 54242 - protein, 9 aa, synthetic construct
GVNASGRVK

SEQ ID NO: 54243 - protein, 9 aa, synthetic construct
GVNASGKLR

SEQ ID NO: 54244 - protein, 9 aa, synthetic construct
GVNASGKVR

SEQ ID NO: 54245 - protein, 9 aa, synthetic construct
GVNAVVHLF

SEQ ID NO: 54246 - protein, 9 aa, synthetic construct
GVNAVVRLR

SEQ ID NO: 54247 - protein, 9 aa, synthetic construct
GVNAVVRVR

SEQ ID NO: 54248 - protein, 9 aa, synthetic construct
GVNAVVKLK

SEQ ID NO: 54249 - protein, 9 aa, synthetic construct
GVNAVVKVK

SEQ ID NO: 54250 - protein, 9 aa, synthetic construct
GVNAVLHLY

SEQ ID NO: 54251 - protein, 9 aa, synthetic construct
GVNAVLHLR

SEQ ID NO: 54252 - protein, 9 aa, synthetic construct
GVNAVLRLK

SEQ ID NO: 54253 - protein, 9 aa, synthetic construct
GVNAVLKLK

SEQ ID NO: 54254 - protein, 9 aa, synthetic construct
GVNAVARLY

SEQ ID NO: 54255 - protein, 9 aa, synthetic construct
GVNAVARLR

SEQ ID NO: 54256 - protein, 9 aa, synthetic construct
GVNAVARLH

SEQ ID NO: 54257 - protein, 9 aa, synthetic construct
GVNAVARLK

SEQ ID NO: 54258 - protein, 9 aa, synthetic construct
GVNAVARLF

SEQ ID NO: 54259 - protein, 9 aa, synthetic construct
GVNAVARVY

SEQ ID NO: 54260 - protein, 9 aa, synthetic construct
GVNAVARVR

SEQ ID NO: 54261 - protein, 9 aa, synthetic construct
GVNAVAKVK

SEQ ID NO: 54262 - protein, 9 aa, synthetic construct
GVNAVIRLR

SEQ ID NO: 54263 - protein, 9 aa, synthetic construct
GVNAVIRVK

SEQ ID NO: 54264 - protein, 9 aa, synthetic construct
GVNAVIKVY

SEQ ID NO: 54265 - protein, 9 aa, synthetic construct
GVNAVGRLR

SEQ ID NO: 54266 - protein, 9 aa, synthetic construct
GVNAVGRLK

SEQ ID NO: 54267 - protein, 9 aa, synthetic construct
GVNAVGRVR

SEQ ID NO: 54268 - protein, 9 aa, synthetic construct
GVNAVGKVK

SEQ ID NO: 54269 - protein, 9 aa, synthetic construct
GVNAGVHLH

SEQ ID NO: 54270 - protein, 9 aa, synthetic construct
GVNAGVHVH

SEQ ID NO: 54271 - protein, 9 aa, synthetic construct
GVNAGVRLK

SEQ ID NO: 54272 - protein, 9 aa, synthetic construct
GVNAGLHLY

SEQ ID NO: 54273 - protein, 9 aa, synthetic construct
GVNAGLHLH

SEQ ID NO: 54274 - protein, 9 aa, synthetic construct
GVNAGLHLK

SEQ ID NO: 54275 - protein, 9 aa, synthetic construct
GVNAGLHLF

SEQ ID NO: 54276 - protein, 9 aa, synthetic construct
GVNAGLHVR

SEQ ID NO: 54277 - protein, 9 aa, synthetic construct
GVNAGLHVK

SEQ ID NO: 54278 - protein, 9 aa, synthetic construct
GVNAGLRLY

SEQ ID NO: 54279 - protein, 9 aa, synthetic construct
GVNAGLRLH

SEQ ID NO: 54280 - protein, 9 aa, synthetic construct
GVNAGLRLK

SEQ ID NO: 54281 - protein, 9 aa, synthetic construct
GVNAGLRLF

SEQ ID NO: 54282 - protein, 9 aa, synthetic construct
GVNAGLRVY

SEQ ID NO: 54283 - protein, 9 aa, synthetic construct
GVNAGLRVF

SEQ ID NO: 54284 - protein, 9 aa, synthetic construct
GVNAGLKLK

SEQ ID NO: 54285 - protein, 9 aa, synthetic construct
GVNAGLKVR

SEQ ID NO: 54286 - protein, 9 aa, synthetic construct
GVNAGLKVK

SEQ ID NO: 54287 - protein, 9 aa, synthetic construct
GVNAGARLR

SEQ ID NO: 54288 - protein, 9 aa, synthetic construct
GVQGAVRLR

SEQ ID NO: 54289 - protein, 9 aa, synthetic construct
GVQGALHLY

SEQ ID NO: 54290 - protein, 9 aa, synthetic construct
GVQGALHLR

SEQ ID NO: 54291 - protein, 9 aa, synthetic construct
GVQGALHLH

SEQ ID NO: 54292 - protein, 9 aa, synthetic construct
GVQGALHLK

SEQ ID NO: 54293 - protein, 9 aa, synthetic construct
GVQGALHLF

SEQ ID NO: 54294 - protein, 9 aa, synthetic construct
GVQGALHVY

SEQ ID NO: 54295 - protein, 9 aa, synthetic construct
GVQGALHVR

SEQ ID NO: 54296 - protein, 9 aa, synthetic construct
GVQGALHVH

SEQ ID NO: 54297 - protein, 9 aa, synthetic construct
GVQGALHVK

SEQ ID NO: 54298 - protein, 9 aa, synthetic construct
GVQGALHVF

SEQ ID NO: 54299 - protein, 9 aa, synthetic construct
GVQGALRLR

SEQ ID NO: 54300 - protein, 9 aa, synthetic construct
GVQGALRLK

SEQ ID NO: 54301 - protein, 9 aa, synthetic construct
GVQGALRVR

SEQ ID NO: 54302 - protein, 9 aa, synthetic construct
GVQGALKLR

SEQ ID NO: 54303 - protein, 9 aa, synthetic construct
GVQGAARLR

SEQ ID NO: 54304 - protein, 9 aa, synthetic construct
GVQGAARLK

SEQ ID NO: 54305 - protein, 9 aa, synthetic construct
GVQGAARVR

SEQ ID NO: 54306 - protein, 9 aa, synthetic construct
GVQGAARVK

SEQ ID NO: 54307 - protein, 9 aa, synthetic construct
GVQGAAKLR

SEQ ID NO: 54308 - protein, 9 aa, synthetic construct
GVQGAAKLK

SEQ ID NO: 54309 - protein, 9 aa, synthetic construct
GVQGAAKVR

SEQ ID NO: 54310 - protein, 9 aa, synthetic construct
GVQGAIRLR

SEQ ID NO: 54311 - protein, 9 aa, synthetic construct
GVQGAIRVR

SEQ ID NO: 54312 - protein, 9 aa, synthetic construct
GVQGAIKVK

SEQ ID NO: 54313 - protein, 9 aa, synthetic construct
GVQGAGRLR

SEQ ID NO: 54314 - protein, 9 aa, synthetic construct
GVQGAGRLK

SEQ ID NO: 54315 - protein, 9 aa, synthetic construct
GVQGAGKLK

SEQ ID NO: 54316 - protein, 9 aa, synthetic construct
GVQGAGKVK

SEQ ID NO: 54317 - protein, 9 aa, synthetic construct
GVQGTVHLH

SEQ ID NO: 54318 - protein, 9 aa, synthetic construct
GVQGTVRLR

SEQ ID NO: 54319 - protein, 9 aa, synthetic construct
GVQGTVRVR

SEQ ID NO: 54320 - protein, 9 aa, synthetic construct
GVQGTVRVK

SEQ ID NO: 54321 - protein, 9 aa, synthetic construct
GVQGTLHLH

SEQ ID NO: 54322 - protein, 9 aa, synthetic construct
GVQGTLHLF

SEQ ID NO: 54323 - protein, 9 aa, synthetic construct
GVQGTLHVY

SEQ ID NO: 54324 - protein, 9 aa, synthetic construct
GVQGTLHVR

SEQ ID NO: 54325 - protein, 9 aa, synthetic construct
GVQGTLHVH

SEQ ID NO: 54326 - protein, 9 aa, synthetic construct
GVQGTLHVK

SEQ ID NO: 54327 - protein, 9 aa, synthetic construct
GVQGTLHVF

SEQ ID NO: 54328 - protein, 9 aa, synthetic construct
GVQGTLRLF

SEQ ID NO: 54329 - protein, 9 aa, synthetic construct
GVQGTLRVY

SEQ ID NO: 54330 - protein, 9 aa, synthetic construct
GVQGTLRVR

SEQ ID NO: 54331 - protein, 9 aa, synthetic construct
GVQGTLRVH

SEQ ID NO: 54332 - protein, 9 aa, synthetic construct
GVQGTARLR

SEQ ID NO: 54333 - protein, 9 aa, synthetic construct
GVQGTARLK

SEQ ID NO: 54334 - protein, 9 aa, synthetic construct
GVQGTIRLR

SEQ ID NO: 54335 - protein, 9 aa, synthetic construct
GVQGTIRLK

SEQ ID NO: 54336 - protein, 9 aa, synthetic construct
GVQGTIRVR

SEQ ID NO: 54337 - protein, 9 aa, synthetic construct
GVQGTIKLR

SEQ ID NO: 54338 - protein, 9 aa, synthetic construct
GVQGTIKLK

SEQ ID NO: 54339 - protein, 9 aa, synthetic construct
GVQGTIKVR

SEQ ID NO: 54340 - protein, 9 aa, synthetic construct
GVQGTGKVK

SEQ ID NO: 54341 - protein, 9 aa, synthetic construct
GVQGSVHVH

SEQ ID NO: 54342 - protein, 9 aa, synthetic construct
GVQGSVRLR

SEQ ID NO: 54343 - protein, 9 aa, synthetic construct
GVQGSVRLK

SEQ ID NO: 54344 - protein, 9 aa, synthetic construct
GVQGSVKLR

SEQ ID NO: 54345 - protein, 9 aa, synthetic construct
GVQGSLHLH

SEQ ID NO: 54346 - protein, 9 aa, synthetic construct
GVQGSLHVF

SEQ ID NO: 54347 - protein, 9 aa, synthetic construct
GVQGSLRLY

SEQ ID NO: 54348 - protein, 9 aa, synthetic construct
GVQGSLRLR

SEQ ID NO: 54349 - protein, 9 aa, synthetic construct
GVQGSLRLH

SEQ ID NO: 54350 - protein, 9 aa, synthetic construct
GVQGSLRLK

SEQ ID NO: 54351 - protein, 9 aa, synthetic construct
GVQGSLRVY

SEQ ID NO: 54352 - protein, 9 aa, synthetic construct
GVQGSLRVR

SEQ ID NO: 54353 - protein, 9 aa, synthetic construct
GVQGSLRVK

SEQ ID NO: 54354 - protein, 9 aa, synthetic construct
GVQGSLKLR

SEQ ID NO: 54355 - protein, 9 aa, synthetic construct
GVQGSLKLK

SEQ ID NO: 54356 - protein, 9 aa, synthetic construct
GVQGSLKVY

SEQ ID NO: 54357 - protein, 9 aa, synthetic construct
GVQGSARLR

SEQ ID NO: 54358 - protein, 9 aa, synthetic construct
GVQGSARLK

SEQ ID NO: 54359 - protein, 9 aa, synthetic construct
GVQGSARVR

SEQ ID NO: 54360 - protein, 9 aa, synthetic construct
GVQGSARVK

SEQ ID NO: 54361 - protein, 9 aa, synthetic construct
GVQGSAKLR

SEQ ID NO: 54362 - protein, 9 aa, synthetic construct
GVQGSAKLK

SEQ ID NO: 54363 - protein, 9 aa, synthetic construct
GVQGSAKVR

SEQ ID NO: 54364 - protein, 9 aa, synthetic construct
GVQGSAKVK

SEQ ID NO: 54365 - protein, 9 aa, synthetic construct
GVQGSIKVK

SEQ ID NO: 54366 - protein, 9 aa, synthetic construct
GVQGSGHVY

SEQ ID NO: 54367 - protein, 9 aa, synthetic construct
GVQGSGRVR

SEQ ID NO: 54368 - protein, 9 aa, synthetic construct
GVQGSGKLR

SEQ ID NO: 54369 - protein, 9 aa, synthetic construct
GVQGSGKLK

SEQ ID NO: 54370 - protein, 9 aa, synthetic construct
GVQGVVRLR

SEQ ID NO: 54371 - protein, 9 aa, synthetic construct
GVQGVVKVR

SEQ ID NO: 54372 - protein, 9 aa, synthetic construct
GVQGVLHLY

SEQ ID NO: 54373 - protein, 9 aa, synthetic construct
GVQGVLHLH

SEQ ID NO: 54374 - protein, 9 aa, synthetic construct
GVQGVLRVR

SEQ ID NO: 54375 - protein, 9 aa, synthetic construct
GVQGVLRVK

SEQ ID NO: 54376 - protein, 9 aa, synthetic construct
GVQGVARLR

SEQ ID NO: 54377 - protein, 9 aa, synthetic construct
GVQGVARLK

SEQ ID NO: 54378 - protein, 9 aa, synthetic construct
GVQGVAKLR

SEQ ID NO: 54379 - protein, 9 aa, synthetic construct
GVQGVAKLK

SEQ ID NO: 54380 - protein, 9 aa, synthetic construct
GVQGVIHLY

SEQ ID NO: 54381 - protein, 9 aa, synthetic construct
GVQGVIHLF

SEQ ID NO: 54382 - protein, 9 aa, synthetic construct
GVQGVIRVR

SEQ ID NO: 54383 - protein, 9 aa, synthetic construct
GVQGVGRLK

SEQ ID NO: 54384 - protein, 9 aa, synthetic construct
GVQGVGKVR

SEQ ID NO: 54385 - protein, 9 aa, synthetic construct
GVQGVGKVK

SEQ ID NO: 54386 - protein, 9 aa, synthetic construct
GVQGGVHVH

SEQ ID NO: 54387 - protein, 9 aa, synthetic construct
GVQGGVKLK

SEQ ID NO: 54388 - protein, 9 aa, synthetic construct
GVQGGLHLR

SEQ ID NO: 54389 - protein, 9 aa, synthetic construct
GVQGGLHLH

SEQ ID NO: 54390 - protein, 9 aa, synthetic construct
GVQGGLHVR

SEQ ID NO: 54391 - protein, 9 aa, synthetic construct
GVQGGLHVH

SEQ ID NO: 54392 - protein, 9 aa, synthetic construct
GVQGGLRLY

SEQ ID NO: 54393 - protein, 9 aa, synthetic construct
GVQGGLRLR

SEQ ID NO: 54394 - protein, 9 aa, synthetic construct
GVQGGLRLK

SEQ ID NO: 54395 - protein, 9 aa, synthetic construct
GVQGGLRVY

SEQ ID NO: 54396 - protein, 9 aa, synthetic construct
GVQGGLRVR

SEQ ID NO: 54397 - protein, 9 aa, synthetic construct
GVQGGLKLK

SEQ ID NO: 54398 - protein, 9 aa, synthetic construct
GVQGGLKVR

SEQ ID NO: 54399 - protein, 9 aa, synthetic construct
GVQGGAHLH

SEQ ID NO: 54400 - protein, 9 aa, synthetic construct
GVQGGARLR

SEQ ID NO: 54401 - protein, 9 aa, synthetic construct
GVQGGARLK

SEQ ID NO: 54402 - protein, 9 aa, synthetic construct
GVQGGARVK

SEQ ID NO: 54403 - protein, 9 aa, synthetic construct
GVQGGAKLR

SEQ ID NO: 54404 - protein, 9 aa, synthetic construct
GVQGGAKLK

SEQ ID NO: 54405 - protein, 9 aa, synthetic construct
GVQGGAKVR

SEQ ID NO: 54406 - protein, 9 aa, synthetic construct
GVQGGAKVK

SEQ ID NO: 54407 - protein, 9 aa, synthetic construct
GVQGGGHLR

SEQ ID NO: 54408 - protein, 9 aa, synthetic construct
GVQGGGHVY

SEQ ID NO: 54409 - protein, 9 aa, synthetic construct
GVQGGGRLR

SEQ ID NO: 54410 - protein, 9 aa, synthetic construct
GVQGGGKLR

SEQ ID NO: 54411 - protein, 9 aa, synthetic construct
GVQGGGKLK

SEQ ID NO: 54412 - protein, 9 aa, synthetic construct
GVQGGGKVR

SEQ ID NO: 54413 - protein, 9 aa, synthetic construct
GVQGGGKVH

SEQ ID NO: 54414 - protein, 9 aa, synthetic construct
GVQGGGKVK

SEQ ID NO: 54415 - protein, 9 aa, synthetic construct
GVQAAVKLR

SEQ ID NO: 54416 - protein, 9 aa, synthetic construct
GVQAALHVY

SEQ ID NO: 54417 - protein, 9 aa, synthetic construct
GVQAALHVR

SEQ ID NO: 54418 - protein, 9 aa, synthetic construct
GVQAALHVH

SEQ ID NO: 54419 - protein, 9 aa, synthetic construct
GVQAALHVK

SEQ ID NO: 54420 - protein, 9 aa, synthetic construct
GVQAALRLR

SEQ ID NO: 54421 - protein, 9 aa, synthetic construct
GVQAALRLK

SEQ ID NO: 54422 - protein, 9 aa, synthetic construct
GVQAALRLF

SEQ ID NO: 54423 - protein, 9 aa, synthetic construct
GVQAALRVR

SEQ ID NO: 54424 - protein, 9 aa, synthetic construct
GVQAALKVR

SEQ ID NO: 54425 - protein, 9 aa, synthetic construct
GVQAAAKLK

SEQ ID NO: 54426 - protein, 9 aa, synthetic construct
GVQAAAKVR

SEQ ID NO: 54427 - protein, 9 aa, synthetic construct
GVQAAGHLH

SEQ ID NO: 54428 - protein, 9 aa, synthetic construct
GVQAAGKLR

SEQ ID NO: 54429 - protein, 9 aa, synthetic construct
GVQAAGKLK

SEQ ID NO: 54430 - protein, 9 aa, synthetic construct
GVQAAGKVK

SEQ ID NO: 54431 - protein, 9 aa, synthetic construct
GVQATVRLH

SEQ ID NO: 54432 - protein, 9 aa, synthetic construct
GVQATVRLK

SEQ ID NO: 54433 - protein, 9 aa, synthetic construct
GVQATVRVR

SEQ ID NO: 54434 - protein, 9 aa, synthetic construct
GVQATVRVK

SEQ ID NO: 54435 - protein, 9 aa, synthetic construct
GVQATVKLR

SEQ ID NO: 54436 - protein, 9 aa, synthetic construct
GVQATVKVY

SEQ ID NO: 54437 - protein, 9 aa, synthetic construct
GVQATVKVR

SEQ ID NO: 54438 - protein, 9 aa, synthetic construct
GVQATLHLY

SEQ ID NO: 54439 - protein, 9 aa, synthetic construct
GVQATLHLH

SEQ ID NO: 54440 - protein, 9 aa, synthetic construct
GVQATLHLF

SEQ ID NO: 54441 - protein, 9 aa, synthetic construct
GVQATLHVY

SEQ ID NO: 54442 - protein, 9 aa, synthetic construct
GVQATLHVK

SEQ ID NO: 54443 - protein, 9 aa, synthetic construct
GVQATLHVF

SEQ ID NO: 54444 - protein, 9 aa, synthetic construct
GVQATLRLR

SEQ ID NO: 54445 - protein, 9 aa, synthetic construct
GVQATLRLH

SEQ ID NO: 54446 - protein, 9 aa, synthetic construct
GVQATLRLK

SEQ ID NO: 54447 - protein, 9 aa, synthetic construct
GVQATLRVY

SEQ ID NO: 54448 - protein, 9 aa, synthetic construct
GVQATLRVR

SEQ ID NO: 54449 - protein, 9 aa, synthetic construct
GVQATLKLR

SEQ ID NO: 54450 - protein, 9 aa, synthetic construct
GVQATLKLK

SEQ ID NO: 54451 - protein, 9 aa, synthetic construct
GVQATLKVR

SEQ ID NO: 54452 - protein, 9 aa, synthetic construct
GVQATLKVK

SEQ ID NO: 54453 - protein, 9 aa, synthetic construct
GVQATARLK

SEQ ID NO: 54454 - protein, 9 aa, synthetic construct
GVQATARVR

SEQ ID NO: 54455 - protein, 9 aa, synthetic construct
GVQATARVH

SEQ ID NO: 54456 - protein, 9 aa, synthetic construct
GVQATARVK

SEQ ID NO: 54457 - protein, 9 aa, synthetic construct
GVQATAKLK

SEQ ID NO: 54458 - protein, 9 aa, synthetic construct
GVQATAKVR

SEQ ID NO: 54459 - protein, 9 aa, synthetic construct
GVQATIHLF

SEQ ID NO: 54460 - protein, 9 aa, synthetic construct
GVQATIHVY

SEQ ID NO: 54461 - protein, 9 aa, synthetic construct
GVQATIRLY

SEQ ID NO: 54462 - protein, 9 aa, synthetic construct
GVQATIRLR

SEQ ID NO: 54463 - protein, 9 aa, synthetic construct
GVQATIRLK

SEQ ID NO: 54464 - protein, 9 aa, synthetic construct
GVQATIRVR

SEQ ID NO: 54465 - protein, 9 aa, synthetic construct
GVQATIRVH

SEQ ID NO: 54466 - protein, 9 aa, synthetic construct
GVQATIRVK

SEQ ID NO: 54467 - protein, 9 aa, synthetic construct
GVQATIKLR

SEQ ID NO: 54468 - protein, 9 aa, synthetic construct
GVQATIKLK

SEQ ID NO: 54469 - protein, 9 aa, synthetic construct
GVQATIKVY

SEQ ID NO: 54470 - protein, 9 aa, synthetic construct
GVQATIKVK

SEQ ID NO: 54471 - protein, 9 aa, synthetic construct
GVQATGRLR

SEQ ID NO: 54472 - protein, 9 aa, synthetic construct
GVQATGRVR

SEQ ID NO: 54473 - protein, 9 aa, synthetic construct
GVQATGRVK

SEQ ID NO: 54474 - protein, 9 aa, synthetic construct
GVQATGKLR

SEQ ID NO: 54475 - protein, 9 aa, synthetic construct
GVQATGKLK

SEQ ID NO: 54476 - protein, 9 aa, synthetic construct
GVQATGKVY

SEQ ID NO: 54477 - protein, 9 aa, synthetic construct
GVQATGKVR

SEQ ID NO: 54478 - protein, 9 aa, synthetic construct
GVQATGKVH

SEQ ID NO: 54479 - protein, 9 aa, synthetic construct
GVQATGKVK

SEQ ID NO: 54480 - protein, 9 aa, synthetic construct
GVQASVHLH

SEQ ID NO: 54481 - protein, 9 aa, synthetic construct
GVQASVHVH

SEQ ID NO: 54482 - protein, 9 aa, synthetic construct
GVQASVKLR

SEQ ID NO: 54483 - protein, 9 aa, synthetic construct
GVQASVKLK

SEQ ID NO: 54484 - protein, 9 aa, synthetic construct
GVQASVKVR

SEQ ID NO: 54485 - protein, 9 aa, synthetic construct
GVQASLHLY

SEQ ID NO: 54486 - protein, 9 aa, synthetic construct
GVQASLHLR

SEQ ID NO: 54487 - protein, 9 aa, synthetic construct
GVQASLHLH

SEQ ID NO: 54488 - protein, 9 aa, synthetic construct
GVQASLHLK

SEQ ID NO: 54489 - protein, 9 aa, synthetic construct
GVQASLHVY

SEQ ID NO: 54490 - protein, 9 aa, synthetic construct
GVQASLHVR

SEQ ID NO: 54491 - protein, 9 aa, synthetic construct
GVQASLHVH

SEQ ID NO: 54492 - protein, 9 aa, synthetic construct
GVQASLHVK

SEQ ID NO: 54493 - protein, 9 aa, synthetic construct
GVQASLHVF

SEQ ID NO: 54494 - protein, 9 aa, synthetic construct
GVQASLRLY

SEQ ID NO: 54495 - protein, 9 aa, synthetic construct
GVQASLRLH

SEQ ID NO: 54496 - protein, 9 aa, synthetic construct
GVQASLRLK

SEQ ID NO: 54497 - protein, 9 aa, synthetic construct
GVQASLRLF

SEQ ID NO: 54498 - protein, 9 aa, synthetic construct
GVQASLRVY

SEQ ID NO: 54499 - protein, 9 aa, synthetic construct
GVQASLRVH

SEQ ID NO: 54500 - protein, 9 aa, synthetic construct
GVQASLRVK

SEQ ID NO: 54501 - protein, 9 aa, synthetic construct
GVQASLRVF

SEQ ID NO: 54502 - protein, 9 aa, synthetic construct
GVQASLKLK

SEQ ID NO: 54503 - protein, 9 aa, synthetic construct
GVQASLKVR

SEQ ID NO: 54504 - protein, 9 aa, synthetic construct
GVQASARLY

SEQ ID NO: 54505 - protein, 9 aa, synthetic construct
GVQASARLH

SEQ ID NO: 54506 - protein, 9 aa, synthetic construct
GVQASARLK

SEQ ID NO: 54507 - protein, 9 aa, synthetic construct
GVQASARVY

SEQ ID NO: 54508 - protein, 9 aa, synthetic construct
GVQASARVR

SEQ ID NO: 54509 - protein, 9 aa, synthetic construct
GVQASARVH

SEQ ID NO: 54510 - protein, 9 aa, synthetic construct
GVQASAKLR

SEQ ID NO: 54511 - protein, 9 aa, synthetic construct
GVQASAKLK

SEQ ID NO: 54512 - protein, 9 aa, synthetic construct
GVQASAKVK

SEQ ID NO: 54513 - protein, 9 aa, synthetic construct
GVQASIRLY

SEQ ID NO: 54514 - protein, 9 aa, synthetic construct
GVQASIRLR

SEQ ID NO: 54515 - protein, 9 aa, synthetic construct
GVQASIRLH

SEQ ID NO: 54516 - protein, 9 aa, synthetic construct
GVQASIRLK

SEQ ID NO: 54517 - protein, 9 aa, synthetic construct
GVQASIRVY

SEQ ID NO: 54518 - protein, 9 aa, synthetic construct
GVQASIRVH

SEQ ID NO: 54519 - protein, 9 aa, synthetic construct
GVQASIRVK

SEQ ID NO: 54520 - protein, 9 aa, synthetic construct
GVQASIKLR

SEQ ID NO: 54521 - protein, 9 aa, synthetic construct
GVQASIKLH

SEQ ID NO: 54522 - protein, 9 aa, synthetic construct
GVQASIKLK

SEQ ID NO: 54523 - protein, 9 aa, synthetic construct
GVQASGHVY

SEQ ID NO: 54524 - protein, 9 aa, synthetic construct
GVQASGHVF

SEQ ID NO: 54525 - protein, 9 aa, synthetic construct
GVQASGRLR

SEQ ID NO: 54526 - protein, 9 aa, synthetic construct
GVQASGRLH

SEQ ID NO: 54527 - protein, 9 aa, synthetic construct
GVQASGRLK

SEQ ID NO: 54528 - protein, 9 aa, synthetic construct
GVQASGRVY

SEQ ID NO: 54529 - protein, 9 aa, synthetic construct
GVQASGRVR

SEQ ID NO: 54530 - protein, 9 aa, synthetic construct
GVQASGKLR

SEQ ID NO: 54531 - protein, 9 aa, synthetic construct
GVQASGKLK

SEQ ID NO: 54532 - protein, 9 aa, synthetic construct
GVQASGKVR

SEQ ID NO: 54533 - protein, 9 aa, synthetic construct
GVQASGKVH

SEQ ID NO: 54534 - protein, 9 aa, synthetic construct
GVQAVVRLR

SEQ ID NO: 54535 - protein, 9 aa, synthetic construct
GVQAVVRLH

SEQ ID NO: 54536 - protein, 9 aa, synthetic construct
GVQAVVRVR

SEQ ID NO: 54537 - protein, 9 aa, synthetic construct
GVQAVVKLF

SEQ ID NO: 54538 - protein, 9 aa, synthetic construct
GVQAVVKVR

SEQ ID NO: 54539 - protein, 9 aa, synthetic construct
GVQAVLHLY

SEQ ID NO: 54540 - protein, 9 aa, synthetic construct
GVQAVLHLR

SEQ ID NO: 54541 - protein, 9 aa, synthetic construct
GVQAVLHLH

SEQ ID NO: 54542 - protein, 9 aa, synthetic construct
GVQAVLHLK

SEQ ID NO: 54543 - protein, 9 aa, synthetic construct
GVQAVLHLF

SEQ ID NO: 54544 - protein, 9 aa, synthetic construct
GVQAVLHVY

SEQ ID NO: 54545 - protein, 9 aa, synthetic construct
GVQAVLHVF

SEQ ID NO: 54546 - protein, 9 aa, synthetic construct
GVQAVLRLY

SEQ ID NO: 54547 - protein, 9 aa, synthetic construct
GVQAVLRLR

SEQ ID NO: 54548 - protein, 9 aa, synthetic construct
GVQAVLRLH

SEQ ID NO: 54549 - protein, 9 aa, synthetic construct
GVQAVLRLF

SEQ ID NO: 54550 - protein, 9 aa, synthetic construct
GVQAVLRVY

SEQ ID NO: 54551 - protein, 9 aa, synthetic construct
GVQAVLRVR

SEQ ID NO: 54552 - protein, 9 aa, synthetic construct
GVQAVLRVH

SEQ ID NO: 54553 - protein, 9 aa, synthetic construct
GVQAVLRVK

SEQ ID NO: 54554 - protein, 9 aa, synthetic construct
GVQAVLRVF

SEQ ID NO: 54555 - protein, 9 aa, synthetic construct
GVQAVLKLR

SEQ ID NO: 54556 - protein, 9 aa, synthetic construct
GVQAVLKLF

SEQ ID NO: 54557 - protein, 9 aa, synthetic construct
GVQAVARLR

SEQ ID NO: 54558 - protein, 9 aa, synthetic construct
GVQAVARLK

SEQ ID NO: 54559 - protein, 9 aa, synthetic construct
GVQAVARVR

SEQ ID NO: 54560 - protein, 9 aa, synthetic construct
GVQAVARVK

SEQ ID NO: 54561 - protein, 9 aa, synthetic construct
GVQAVAKLR

SEQ ID NO: 54562 - protein, 9 aa, synthetic construct
GVQAVAKVK

SEQ ID NO: 54563 - protein, 9 aa, synthetic construct
GVQAVIHVF

SEQ ID NO: 54564 - protein, 9 aa, synthetic construct
GVQAVIRVH

SEQ ID NO: 54565 - protein, 9 aa, synthetic construct
GVQAVIRVK

SEQ ID NO: 54566 - protein, 9 aa, synthetic construct
GVQAVIKLF

SEQ ID NO: 54567 - protein, 9 aa, synthetic construct
GVQAVIKVY

SEQ ID NO: 54568 - protein, 9 aa, synthetic construct
GVQAGVHLY

SEQ ID NO: 54569 - protein, 9 aa, synthetic construct
GVQAGVHLF

SEQ ID NO: 54570 - protein, 9 aa, synthetic construct
GVQAGVHVH

SEQ ID NO: 54571 - protein, 9 aa, synthetic construct
GVQAGVRLR

SEQ ID NO: 54572 - protein, 9 aa, synthetic construct
GVQAGVRLK

SEQ ID NO: 54573 - protein, 9 aa, synthetic construct
GVQAGVKLR

SEQ ID NO: 54574 - protein, 9 aa, synthetic construct
GVQAGVKLK

SEQ ID NO: 54575 - protein, 9 aa, synthetic construct
GVQAGVKVR

SEQ ID NO: 54576 - protein, 9 aa, synthetic construct
GVQAGVKVK

SEQ ID NO: 54577 - protein, 9 aa, synthetic construct
GVQAGLHLY

SEQ ID NO: 54578 - protein, 9 aa, synthetic construct
GVQAGLHLR

SEQ ID NO: 54579 - protein, 9 aa, synthetic construct
GVQAGLHLH

SEQ ID NO: 54580 - protein, 9 aa, synthetic construct
GVQAGLHLK

SEQ ID NO: 54581 - protein, 9 aa, synthetic construct
GVQAGLHLF

SEQ ID NO: 54582 - protein, 9 aa, synthetic construct
GVQAGLHVY

SEQ ID NO: 54583 - protein, 9 aa, synthetic construct
GVQAGLHVR

SEQ ID NO: 54584 - protein, 9 aa, synthetic construct
GVQAGLHVH

SEQ ID NO: 54585 - protein, 9 aa, synthetic construct
GVQAGLHVK

SEQ ID NO: 54586 - protein, 9 aa, synthetic construct
GVQAGLHVF

SEQ ID NO: 54587 - protein, 9 aa, synthetic construct
GVQAGLRLY

SEQ ID NO: 54588 - protein, 9 aa, synthetic construct
GVQAGLRLR

SEQ ID NO: 54589 - protein, 9 aa, synthetic construct
GVQAGLRLH

SEQ ID NO: 54590 - protein, 9 aa, synthetic construct
GVQAGLRLK

SEQ ID NO: 54591 - protein, 9 aa, synthetic construct
GVQAGLRLF

SEQ ID NO: 54592 - protein, 9 aa, synthetic construct
GVQAGLRVY

SEQ ID NO: 54593 - protein, 9 aa, synthetic construct
GVQAGLRVR

SEQ ID NO: 54594 - protein, 9 aa, synthetic construct
GVQAGLRVH

SEQ ID NO: 54595 - protein, 9 aa, synthetic construct
GVQAGLRVK

SEQ ID NO: 54596 - protein, 9 aa, synthetic construct
GVQAGLKLY

SEQ ID NO: 54597 - protein, 9 aa, synthetic construct
GVQAGLKLR

SEQ ID NO: 54598 - protein, 9 aa, synthetic construct
GVQAGLKLH

SEQ ID NO: 54599 - protein, 9 aa, synthetic construct
GVQAGLKLK

SEQ ID NO: 54600 - protein, 9 aa, synthetic construct
GVQAGLKVK

SEQ ID NO: 54601 - protein, 9 aa, synthetic construct
GVQAGLKVF

SEQ ID NO: 54602 - protein, 9 aa, synthetic construct
GVQAGAHLH

SEQ ID NO: 54603 - protein, 9 aa, synthetic construct
GVQAGARLR

SEQ ID NO: 54604 - protein, 9 aa, synthetic construct
GVQAGARLK

SEQ ID NO: 54605 - protein, 9 aa, synthetic construct
GVQAGARVR

SEQ ID NO: 54606 - protein, 9 aa, synthetic construct
GVQAGARVK

SEQ ID NO: 54607 - protein, 9 aa, synthetic construct
GVQAGAKLR

SEQ ID NO: 54608 - protein, 9 aa, synthetic construct
GVQAGAKLK

SEQ ID NO: 54609 - protein, 9 aa, synthetic construct
GVQAGAKVR

SEQ ID NO: 54610 - protein, 9 aa, synthetic construct
GVQAGAKVK

SEQ ID NO: 54611 - protein, 9 aa, synthetic construct
GVQAGIRLK

SEQ ID NO: 54612 - protein, 9 aa, synthetic construct
GVQAGIRVR

SEQ ID NO: 54613 - protein, 9 aa, synthetic construct
GVQAGIRVK

SEQ ID NO: 54614 - protein, 9 aa, synthetic construct
GVQAGIKVR

SEQ ID NO: 54615 - protein, 9 aa, synthetic construct
GVQAGIKVK

SEQ ID NO: 54616 - protein, 9 aa, synthetic construct
GVQAGGHLY

SEQ ID NO: 54617 - protein, 9 aa, synthetic construct
GVQAGGHLR

SEQ ID NO: 54618 - protein, 9 aa, synthetic construct
GVQAGGHVR

SEQ ID NO: 54619 - protein, 9 aa, synthetic construct
GVQAGGRLR

SEQ ID NO: 54620 - protein, 9 aa, synthetic construct
GVQAGGKLR

SEQ ID NO: 54621 - protein, 9 aa, synthetic construct
GVQAGGKLK

SEQ ID NO: 54622 - protein, 9 aa, synthetic construct
GVQAGGKVR

SEQ ID NO: 54623 - protein, 9 aa, synthetic construct
GVPGAVHLY

SEQ ID NO: 54624 - protein, 9 aa, synthetic construct
GVPGAVHLR

SEQ ID NO: 54625 - protein, 9 aa, synthetic construct
GVPGAVHLH

SEQ ID NO: 54626 - protein, 9 aa, synthetic construct
GVPGAVHLK

SEQ ID NO: 54627 - protein, 9 aa, synthetic construct
GVPGAVHLF

SEQ ID NO: 54628 - protein, 9 aa, synthetic construct
GVPGAVHVY

SEQ ID NO: 54629 - protein, 9 aa, synthetic construct
GVPGAVHVR

SEQ ID NO: 54630 - protein, 9 aa, synthetic construct
GVPGAVHVH

SEQ ID NO: 54631 - protein, 9 aa, synthetic construct
GVPGAVHVK

SEQ ID NO: 54632 - protein, 9 aa, synthetic construct
GVPGAVHVF

SEQ ID NO: 54633 - protein, 9 aa, synthetic construct
GVPGAVRLR

SEQ ID NO: 54634 - protein, 9 aa, synthetic construct
GVPGAVRVR

SEQ ID NO: 54635 - protein, 9 aa, synthetic construct
GVPGALHVR

SEQ ID NO: 54636 - protein, 9 aa, synthetic construct
GVPGALRLR

SEQ ID NO: 54637 - protein, 9 aa, synthetic construct
GVPGALRLK

SEQ ID NO: 54638 - protein, 9 aa, synthetic construct
GVPGALRVY

SEQ ID NO: 54639 - protein, 9 aa, synthetic construct
GVPGALRVR

SEQ ID NO: 54640 - protein, 9 aa, synthetic construct
GVPGALKLK

SEQ ID NO: 54641 - protein, 9 aa, synthetic construct
GVPGALKVR

SEQ ID NO: 54642 - protein, 9 aa, synthetic construct
GVPGALKVK

SEQ ID NO: 54643 - protein, 9 aa, synthetic construct
GVPGAARVR

SEQ ID NO: 54644 - protein, 9 aa, synthetic construct
GVPGAAKLR

SEQ ID NO: 54645 - protein, 9 aa, synthetic construct
GVPGAIRLR

SEQ ID NO: 54646 - protein, 9 aa, synthetic construct
GVPGAIRVK

SEQ ID NO: 54647 - protein, 9 aa, synthetic construct
GVPGAGHLY

SEQ ID NO: 54648 - protein, 9 aa, synthetic construct
GVPGAGHLR

SEQ ID NO: 54649 - protein, 9 aa, synthetic construct
GVPGAGHLH

SEQ ID NO: 54650 - protein, 9 aa, synthetic construct
GVPGAGHLK

SEQ ID NO: 54651 - protein, 9 aa, synthetic construct
GVPGAGHLF

SEQ ID NO: 54652 - protein, 9 aa, synthetic construct
GVPGAGHVY

SEQ ID NO: 54653 - protein, 9 aa, synthetic construct
GVPGAGHVR

SEQ ID NO: 54654 - protein, 9 aa, synthetic construct
GVPGAGHVH

SEQ ID NO: 54655 - protein, 9 aa, synthetic construct
GVPGAGHVK

SEQ ID NO: 54656 - protein, 9 aa, synthetic construct
GVPGAGHVF

SEQ ID NO: 54657 - protein, 9 aa, synthetic construct
GVPGAGRLR

SEQ ID NO: 54658 - protein, 9 aa, synthetic construct
GVPGAGRLK

SEQ ID NO: 54659 - protein, 9 aa, synthetic construct
GVPGAGKVK

SEQ ID NO: 54660 - protein, 9 aa, synthetic construct
GVPGTVHVK

SEQ ID NO: 54661 - protein, 9 aa, synthetic construct
GVPGTVKVR

SEQ ID NO: 54662 - protein, 9 aa, synthetic construct
GVPGTLRLR

SEQ ID NO: 54663 - protein, 9 aa, synthetic construct
GVPGTLRVY

SEQ ID NO: 54664 - protein, 9 aa, synthetic construct
GVPGTLRVR

SEQ ID NO: 54665 - protein, 9 aa, synthetic construct
GVPGTLRVH

SEQ ID NO: 54666 - protein, 9 aa, synthetic construct
GVPGTLRVK

SEQ ID NO: 54667 - protein, 9 aa, synthetic construct
GVPGTLRVF

SEQ ID NO: 54668 - protein, 9 aa, synthetic construct
GVPGTLKLK

SEQ ID NO: 54669 - protein, 9 aa, synthetic construct
GVPGTLKVR

SEQ ID NO: 54670 - protein, 9 aa, synthetic construct
GVPGTARLR

SEQ ID NO: 54671 - protein, 9 aa, synthetic construct
GVPGTARVR

SEQ ID NO: 54672 - protein, 9 aa, synthetic construct
GVPGTAKLR

SEQ ID NO: 54673 - protein, 9 aa, synthetic construct
GVPGTAKVR

SEQ ID NO: 54674 - protein, 9 aa, synthetic construct
GVPGTIRVR

SEQ ID NO: 54675 - protein, 9 aa, synthetic construct
GVPGTIRVK

SEQ ID NO: 54676 - protein, 9 aa, synthetic construct
GVPGTIKLR

SEQ ID NO: 54677 - protein, 9 aa, synthetic construct
GVPGTGHVR

SEQ ID NO: 54678 - protein, 9 aa, synthetic construct
GVPGTGHVK

SEQ ID NO: 54679 - protein, 9 aa, synthetic construct
GVPGTGRVK

SEQ ID NO: 54680 - protein, 9 aa, synthetic construct
GVPGTGKLR

SEQ ID NO: 54681 - protein, 9 aa, synthetic construct
GVPGTGKVR

SEQ ID NO: 54682 - protein, 9 aa, synthetic construct
GVPGSVHVH

SEQ ID NO: 54683 - protein, 9 aa, synthetic construct
GVPGSVRLK

SEQ ID NO: 54684 - protein, 9 aa, synthetic construct
GVPGSVKLR

SEQ ID NO: 54685 - protein, 9 aa, synthetic construct
GVPGSVKLK

SEQ ID NO: 54686 - protein, 9 aa, synthetic construct
GVPGSLHLY

SEQ ID NO: 54687 - protein, 9 aa, synthetic construct
GVPGSLHLR

SEQ ID NO: 54688 - protein, 9 aa, synthetic construct
GVPGSLRLY

SEQ ID NO: 54689 - protein, 9 aa, synthetic construct
GVPGSLRLR

SEQ ID NO: 54690 - protein, 9 aa, synthetic construct
GVPGSLRLH

SEQ ID NO: 54691 - protein, 9 aa, synthetic construct
GVPGSLRLK

SEQ ID NO: 54692 - protein, 9 aa, synthetic construct
GVPGSLRLF

SEQ ID NO: 54693 - protein, 9 aa, synthetic construct
GVPGSLRVK

SEQ ID NO: 54694 - protein, 9 aa, synthetic construct
GVPGSLKLR

SEQ ID NO: 54695 - protein, 9 aa, synthetic construct
GVPGSLKLK

SEQ ID NO: 54696 - protein, 9 aa, synthetic construct
GVPGSLKVR

SEQ ID NO: 54697 - protein, 9 aa, synthetic construct
GVPGSLKVK

SEQ ID NO: 54698 - protein, 9 aa, synthetic construct
GVPGSARLR

SEQ ID NO: 54699 - protein, 9 aa, synthetic construct
GVPGSARLK

SEQ ID NO: 54700 - protein, 9 aa, synthetic construct
GVPGSARVH

SEQ ID NO: 54701 - protein, 9 aa, synthetic construct
GVPGSARVK

SEQ ID NO: 54702 - protein, 9 aa, synthetic construct
GVPGSAKLK

SEQ ID NO: 54703 - protein, 9 aa, synthetic construct
GVPGSAKVR

SEQ ID NO: 54704 - protein, 9 aa, synthetic construct
GVPGSIRLR

SEQ ID NO: 54705 - protein, 9 aa, synthetic construct
GVPGSIRVK

SEQ ID NO: 54706 - protein, 9 aa, synthetic construct
GVPGSIKVR

SEQ ID NO: 54707 - protein, 9 aa, synthetic construct
GVPGSIKVK

SEQ ID NO: 54708 - protein, 9 aa, synthetic construct
GVPGSGRLR

SEQ ID NO: 54709 - protein, 9 aa, synthetic construct
GVPGSGRLK

SEQ ID NO: 54710 - protein, 9 aa, synthetic construct
GVPGSGRVR

SEQ ID NO: 54711 - protein, 9 aa, synthetic construct
GVPGSGRVK

SEQ ID NO: 54712 - protein, 9 aa, synthetic construct
GVPGSGKLR

SEQ ID NO: 54713 - protein, 9 aa, synthetic construct
GVPGSGKLK

SEQ ID NO: 54714 - protein, 9 aa, synthetic construct
GVPGSGKVR

SEQ ID NO: 54715 - protein, 9 aa, synthetic construct
GVPGVVRLR

SEQ ID NO: 54716 - protein, 9 aa, synthetic construct
GVPGVVRLK

SEQ ID NO: 54717 - protein, 9 aa, synthetic construct
GVPGVVRVK

SEQ ID NO: 54718 - protein, 9 aa, synthetic construct
GVPGVVKLR

SEQ ID NO: 54719 - protein, 9 aa, synthetic construct
GVPGVVKLK

SEQ ID NO: 54720 - protein, 9 aa, synthetic construct
GVPGVVKVR

SEQ ID NO: 54721 - protein, 9 aa, synthetic construct
GVPGVVKVK

SEQ ID NO: 54722 - protein, 9 aa, synthetic construct
GVPGVLHLR

SEQ ID NO: 54723 - protein, 9 aa, synthetic construct
GVPGVLHLF

SEQ ID NO: 54724 - protein, 9 aa, synthetic construct
GVPGVLHVR

SEQ ID NO: 54725 - protein, 9 aa, synthetic construct
GVPGVLHVF

SEQ ID NO: 54726 - protein, 9 aa, synthetic construct
GVPGVLRLY

SEQ ID NO: 54727 - protein, 9 aa, synthetic construct
GVPGVLRLR

SEQ ID NO: 54728 - protein, 9 aa, synthetic construct
GVPGVLRLH

SEQ ID NO: 54729 - protein, 9 aa, synthetic construct
GVPGVLRLK

SEQ ID NO: 54730 - protein, 9 aa, synthetic construct
GVPGVLRLF

SEQ ID NO: 54731 - protein, 9 aa, synthetic construct
GVPGVLRVY

SEQ ID NO: 54732 - protein, 9 aa, synthetic construct
GVPGVLRVH

SEQ ID NO: 54733 - protein, 9 aa, synthetic construct
GVPGVLRVF

SEQ ID NO: 54734 - protein, 9 aa, synthetic construct
GVPGVLKVK

SEQ ID NO: 54735 - protein, 9 aa, synthetic construct
GVPGVARLR

SEQ ID NO: 54736 - protein, 9 aa, synthetic construct
GVPGVARLH

SEQ ID NO: 54737 - protein, 9 aa, synthetic construct
GVPGVARLK

SEQ ID NO: 54738 - protein, 9 aa, synthetic construct
GVPGVARVR

SEQ ID NO: 54739 - protein, 9 aa, synthetic construct
GVPGVARVK

SEQ ID NO: 54740 - protein, 9 aa, synthetic construct
GVPGVAKLR

SEQ ID NO: 54741 - protein, 9 aa, synthetic construct
GVPGVAKLK

SEQ ID NO: 54742 - protein, 9 aa, synthetic construct
GVPGVAKVY

SEQ ID NO: 54743 - protein, 9 aa, synthetic construct
GVPGVAKVR

SEQ ID NO: 54744 - protein, 9 aa, synthetic construct
GVPGVAKVK

SEQ ID NO: 54745 - protein, 9 aa, synthetic construct
GVPGVIRLK

SEQ ID NO: 54746 - protein, 9 aa, synthetic construct
GVPGVIKLR

SEQ ID NO: 54747 - protein, 9 aa, synthetic construct
GVPGVIKVR

SEQ ID NO: 54748 - protein, 9 aa, synthetic construct
GVPGVGRLR

SEQ ID NO: 54749 - protein, 9 aa, synthetic construct
GVPGVGRLH

SEQ ID NO: 54750 - protein, 9 aa, synthetic construct
GVPGVGRLK

SEQ ID NO: 54751 - protein, 9 aa, synthetic construct
GVPGVGKVK

SEQ ID NO: 54752 - protein, 9 aa, synthetic construct
GVPGGVHLH

SEQ ID NO: 54753 - protein, 9 aa, synthetic construct
GVPGGVHVH

SEQ ID NO: 54754 - protein, 9 aa, synthetic construct
GVPGGVRLR

SEQ ID NO: 54755 - protein, 9 aa, synthetic construct
GVPGGVRLK

SEQ ID NO: 54756 - protein, 9 aa, synthetic construct
GVPGGVRVR

SEQ ID NO: 54757 - protein, 9 aa, synthetic construct
GVPGGVKLR

SEQ ID NO: 54758 - protein, 9 aa, synthetic construct
GVPGGVKLK

SEQ ID NO: 54759 - protein, 9 aa, synthetic construct
GVPGGVKVR

SEQ ID NO: 54760 - protein, 9 aa, synthetic construct
GVPGGLHLK

SEQ ID NO: 54761 - protein, 9 aa, synthetic construct
GVPGGLRLY

SEQ ID NO: 54762 - protein, 9 aa, synthetic construct
GVPGGLRLR

SEQ ID NO: 54763 - protein, 9 aa, synthetic construct
GVPGGLRLK

SEQ ID NO: 54764 - protein, 9 aa, synthetic construct
GVPGGLRVY

SEQ ID NO: 54765 - protein, 9 aa, synthetic construct
GVPGGLRVR

SEQ ID NO: 54766 - protein, 9 aa, synthetic construct
GVPGGLRVH

SEQ ID NO: 54767 - protein, 9 aa, synthetic construct
GVPGGLRVK

SEQ ID NO: 54768 - protein, 9 aa, synthetic construct
GVPGGLRVF

SEQ ID NO: 54769 - protein, 9 aa, synthetic construct
GVPGGLKLR

SEQ ID NO: 54770 - protein, 9 aa, synthetic construct
GVPGGLKLK

SEQ ID NO: 54771 - protein, 9 aa, synthetic construct
GVPGGLKVY

SEQ ID NO: 54772 - protein, 9 aa, synthetic construct
GVPGGLKVR

SEQ ID NO: 54773 - protein, 9 aa, synthetic construct
GVPGGARLR

SEQ ID NO: 54774 - protein, 9 aa, synthetic construct
GVPGGARLH

SEQ ID NO: 54775 - protein, 9 aa, synthetic construct
GVPGGARLK

SEQ ID NO: 54776 - protein, 9 aa, synthetic construct
GVPGGARVR

SEQ ID NO: 54777 - protein, 9 aa, synthetic construct
GVPGGARVH

SEQ ID NO: 54778 - protein, 9 aa, synthetic construct
GVPGGAKLR

SEQ ID NO: 54779 - protein, 9 aa, synthetic construct
GVPGGAKLK

SEQ ID NO: 54780 - protein, 9 aa, synthetic construct
GVPGGAKVR

SEQ ID NO: 54781 - protein, 9 aa, synthetic construct
GVPGGAKVK

SEQ ID NO: 54782 - protein, 9 aa, synthetic construct
GVPGGIRLR

SEQ ID NO: 54783 - protein, 9 aa, synthetic construct
GVPGGIRVK

SEQ ID NO: 54784 - protein, 9 aa, synthetic construct
GVPGGIRVF

SEQ ID NO: 54785 - protein, 9 aa, synthetic construct
GVPGGGRLR

SEQ ID NO: 54786 - protein, 9 aa, synthetic construct
GVPGGGRLH

SEQ ID NO: 54787 - protein, 9 aa, synthetic construct
GVPGGGRVR

SEQ ID NO: 54788 - protein, 9 aa, synthetic construct
GVPGGGKLK

SEQ ID NO: 54789 - protein, 9 aa, synthetic construct
GVPGGGKVR

SEQ ID NO: 54790 - protein, 9 aa, synthetic construct
GVPGGGKVK

SEQ ID NO: 54791 - protein, 9 aa, synthetic construct
GVPAAVHVY

SEQ ID NO: 54792 - protein, 9 aa, synthetic construct
GVPAAVHVR

SEQ ID NO: 54793 - protein, 9 aa, synthetic construct
GVPAAVHVK

SEQ ID NO: 54794 - protein, 9 aa, synthetic construct
GVPAAVHVF

SEQ ID NO: 54795 - protein, 9 aa, synthetic construct
GVPAAVRVR

SEQ ID NO: 54796 - protein, 9 aa, synthetic construct
GVPAAVRVK

SEQ ID NO: 54797 - protein, 9 aa, synthetic construct
GVPAAVKVR

SEQ ID NO: 54798 - protein, 9 aa, synthetic construct
GVPAALRLR

SEQ ID NO: 54799 - protein, 9 aa, synthetic construct
GVPAALRVR

SEQ ID NO: 54800 - protein, 9 aa, synthetic construct
GVPAAAKLR

SEQ ID NO: 54801 - protein, 9 aa, synthetic construct
GVPAAIKLR

SEQ ID NO: 54802 - protein, 9 aa, synthetic construct
GVPAAGHVY

SEQ ID NO: 54803 - protein, 9 aa, synthetic construct
GVPAAGHVR

SEQ ID NO: 54804 - protein, 9 aa, synthetic construct
GVPAAGHVK

SEQ ID NO: 54805 - protein, 9 aa, synthetic construct
GVPAAGHVF

SEQ ID NO: 54806 - protein, 9 aa, synthetic construct
GVPAAGRLR

SEQ ID NO: 54807 - protein, 9 aa, synthetic construct
GVPATVRLR

SEQ ID NO: 54808 - protein, 9 aa, synthetic construct
GVPATVRLH

SEQ ID NO: 54809 - protein, 9 aa, synthetic construct
GVPATVRLK

SEQ ID NO: 54810 - protein, 9 aa, synthetic construct
GVPATVKLK

SEQ ID NO: 54811 - protein, 9 aa, synthetic construct
GVPATVKVR

SEQ ID NO: 54812 - protein, 9 aa, synthetic construct
GVPATLHLY

SEQ ID NO: 54813 - protein, 9 aa, synthetic construct
GVPATLRLK

SEQ ID NO: 54814 - protein, 9 aa, synthetic construct
GVPATLRVR

SEQ ID NO: 54815 - protein, 9 aa, synthetic construct
GVPATLRVH

SEQ ID NO: 54816 - protein, 9 aa, synthetic construct
GVPATLRVK

SEQ ID NO: 54817 - protein, 9 aa, synthetic construct
GVPATLRVF

SEQ ID NO: 54818 - protein, 9 aa, synthetic construct
GVPATLKLR

SEQ ID NO: 54819 - protein, 9 aa, synthetic construct
GVPATLKVR

SEQ ID NO: 54820 - protein, 9 aa, synthetic construct
GVPATARVK

SEQ ID NO: 54821 - protein, 9 aa, synthetic construct
GVPATAKVR

SEQ ID NO: 54822 - protein, 9 aa, synthetic construct
GVPATIHLY

SEQ ID NO: 54823 - protein, 9 aa, synthetic construct
GVPATIRLK

SEQ ID NO: 54824 - protein, 9 aa, synthetic construct
GVPATIRVR

SEQ ID NO: 54825 - protein, 9 aa, synthetic construct
GVPATIRVK

SEQ ID NO: 54826 - protein, 9 aa, synthetic construct
GVPATIKLK

SEQ ID NO: 54827 - protein, 9 aa, synthetic construct
GVPATIKVR

SEQ ID NO: 54828 - protein, 9 aa, synthetic construct
GVPATGRLR

SEQ ID NO: 54829 - protein, 9 aa, synthetic construct
GVPATGRLK

SEQ ID NO: 54830 - protein, 9 aa, synthetic construct
GVPATGRVR

SEQ ID NO: 54831 - protein, 9 aa, synthetic construct
GVPATGRVK

SEQ ID NO: 54832 - protein, 9 aa, synthetic construct
GVPATGKVR

SEQ ID NO: 54833 - protein, 9 aa, synthetic construct
GVPASVHLF

SEQ ID NO: 54834 - protein, 9 aa, synthetic construct
GVPASVHVR

SEQ ID NO: 54835 - protein, 9 aa, synthetic construct
GVPASVHVH

SEQ ID NO: 54836 - protein, 9 aa, synthetic construct
GVPASVHVF

SEQ ID NO: 54837 - protein, 9 aa, synthetic construct
GVPASVRLR

SEQ ID NO: 54838 - protein, 9 aa, synthetic construct
GVPASVRVR

SEQ ID NO: 54839 - protein, 9 aa, synthetic construct
GVPASVRVK

SEQ ID NO: 54840 - protein, 9 aa, synthetic construct
GVPASVKLR

SEQ ID NO: 54841 - protein, 9 aa, synthetic construct
GVPASLHLH

SEQ ID NO: 54842 - protein, 9 aa, synthetic construct
GVPASLHLF

SEQ ID NO: 54843 - protein, 9 aa, synthetic construct
GVPASLHVF

SEQ ID NO: 54844 - protein, 9 aa, synthetic construct
GVPASLRLY

SEQ ID NO: 54845 - protein, 9 aa, synthetic construct
GVPASLRLR

SEQ ID NO: 54846 - protein, 9 aa, synthetic construct
GVPASLRLH

SEQ ID NO: 54847 - protein, 9 aa, synthetic construct
GVPASLRLK

SEQ ID NO: 54848 - protein, 9 aa, synthetic construct
GVPASLRVY

SEQ ID NO: 54849 - protein, 9 aa, synthetic construct
GVPASLRVR

SEQ ID NO: 54850 - protein, 9 aa, synthetic construct
GVPASLRVK

SEQ ID NO: 54851 - protein, 9 aa, synthetic construct
GVPASLKLR

SEQ ID NO: 54852 - protein, 9 aa, synthetic construct
GVPASLKLK

SEQ ID NO: 54853 - protein, 9 aa, synthetic construct
GVPASLKVR

SEQ ID NO: 54854 - protein, 9 aa, synthetic construct
GVPASLKVK

SEQ ID NO: 54855 - protein, 9 aa, synthetic construct
GVPASARLR

SEQ ID NO: 54856 - protein, 9 aa, synthetic construct
GVPASARVR

SEQ ID NO: 54857 - protein, 9 aa, synthetic construct
GVPASAKLR

SEQ ID NO: 54858 - protein, 9 aa, synthetic construct
GVPASAKLK

SEQ ID NO: 54859 - protein, 9 aa, synthetic construct
GVPASAKVR

SEQ ID NO: 54860 - protein, 9 aa, synthetic construct
GVPASIRLY

SEQ ID NO: 54861 - protein, 9 aa, synthetic construct
GVPASIRLR

SEQ ID NO: 54862 - protein, 9 aa, synthetic construct
GVPASIRLK

SEQ ID NO: 54863 - protein, 9 aa, synthetic construct
GVPASIKLR

SEQ ID NO: 54864 - protein, 9 aa, synthetic construct
GVPASIKVR

SEQ ID NO: 54865 - protein, 9 aa, synthetic construct
GVPASGHVF

SEQ ID NO: 54866 - protein, 9 aa, synthetic construct
GVPASGRLR

SEQ ID NO: 54867 - protein, 9 aa, synthetic construct
GVPASGRLK

SEQ ID NO: 54868 - protein, 9 aa, synthetic construct
GVPASGRVR

SEQ ID NO: 54869 - protein, 9 aa, synthetic construct
GVPASGKLK

SEQ ID NO: 54870 - protein, 9 aa, synthetic construct
GVPASGKVR

SEQ ID NO: 54871 - protein, 9 aa, synthetic construct
GVPAVVRLR

SEQ ID NO: 54872 - protein, 9 aa, synthetic construct
GVPAVVKLR

SEQ ID NO: 54873 - protein, 9 aa, synthetic construct
GVPAVVKLK

SEQ ID NO: 54874 - protein, 9 aa, synthetic construct
GVPAVLHLY

SEQ ID NO: 54875 - protein, 9 aa, synthetic construct
GVPAVLHLR

SEQ ID NO: 54876 - protein, 9 aa, synthetic construct
GVPAVLHLH

SEQ ID NO: 54877 - protein, 9 aa, synthetic construct
GVPAVLHLF

SEQ ID NO: 54878 - protein, 9 aa, synthetic construct
GVPAVLHVY

SEQ ID NO: 54879 - protein, 9 aa, synthetic construct
GVPAVLHVR

SEQ ID NO: 54880 - protein, 9 aa, synthetic construct
GVPAVLHVH

SEQ ID NO: 54881 - protein, 9 aa, synthetic construct
GVPAVLRLY

SEQ ID NO: 54882 - protein, 9 aa, synthetic construct
GVPAVLRLR

SEQ ID NO: 54883 - protein, 9 aa, synthetic construct
GVPAVLRVY

SEQ ID NO: 54884 - protein, 9 aa, synthetic construct
GVPAVLRVR

SEQ ID NO: 54885 - protein, 9 aa, synthetic construct
GVPAVARLR

SEQ ID NO: 54886 - protein, 9 aa, synthetic construct
GVPAVARLK

SEQ ID NO: 54887 - protein, 9 aa, synthetic construct
GVPAVARVR

SEQ ID NO: 54888 - protein, 9 aa, synthetic construct
GVPAVARVK

SEQ ID NO: 54889 - protein, 9 aa, synthetic construct
GVPAVAKLR

SEQ ID NO: 54890 - protein, 9 aa, synthetic construct
GVPAVAKVK

SEQ ID NO: 54891 - protein, 9 aa, synthetic construct
GVPAVIRLF

SEQ ID NO: 54892 - protein, 9 aa, synthetic construct
GVPAVIRVY

SEQ ID NO: 54893 - protein, 9 aa, synthetic construct
GVPAVIKVR

SEQ ID NO: 54894 - protein, 9 aa, synthetic construct
GVPAVIKVK

SEQ ID NO: 54895 - protein, 9 aa, synthetic construct
GVPAVGRLR

SEQ ID NO: 54896 - protein, 9 aa, synthetic construct
GVPAVGKLK

SEQ ID NO: 54897 - protein, 9 aa, synthetic construct
GVPAGVHLY

SEQ ID NO: 54898 - protein, 9 aa, synthetic construct
GVPAGVHLR

SEQ ID NO: 54899 - protein, 9 aa, synthetic construct
GVPAGVHLH

SEQ ID NO: 54900 - protein, 9 aa, synthetic construct
GVPAGVHLK

SEQ ID NO: 54901 - protein, 9 aa, synthetic construct
GVPAGVHLF

SEQ ID NO: 54902 - protein, 9 aa, synthetic construct
GVPAGVHVY

SEQ ID NO: 54903 - protein, 9 aa, synthetic construct
GVPAGVHVR

SEQ ID NO: 54904 - protein, 9 aa, synthetic construct
GVPAGVHVH

SEQ ID NO: 54905 - protein, 9 aa, synthetic construct
GVPAGVHVK

SEQ ID NO: 54906 - protein, 9 aa, synthetic construct
GVPAGVHVF

SEQ ID NO: 54907 - protein, 9 aa, synthetic construct
GVPAGVRLR

SEQ ID NO: 54908 - protein, 9 aa, synthetic construct
GVPAGVRLK

SEQ ID NO: 54909 - protein, 9 aa, synthetic construct
GVPAGVRVR

SEQ ID NO: 54910 - protein, 9 aa, synthetic construct
GVPAGVKLR

SEQ ID NO: 54911 - protein, 9 aa, synthetic construct
GVPAGVKLK

SEQ ID NO: 54912 - protein, 9 aa, synthetic construct
GVPAGVKVR

SEQ ID NO: 54913 - protein, 9 aa, synthetic construct
GVPAGLHLY

SEQ ID NO: 54914 - protein, 9 aa, synthetic construct
GVPAGLHLR

SEQ ID NO: 54915 - protein, 9 aa, synthetic construct
GVPAGLHLK

SEQ ID NO: 54916 - protein, 9 aa, synthetic construct
GVPAGLHLF

SEQ ID NO: 54917 - protein, 9 aa, synthetic construct
GVPAGLHVY

SEQ ID NO: 54918 - protein, 9 aa, synthetic construct
GVPAGLHVR

SEQ ID NO: 54919 - protein, 9 aa, synthetic construct
GVPAGLHVH

SEQ ID NO: 54920 - protein, 9 aa, synthetic construct
GVPAGLHVK

SEQ ID NO: 54921 - protein, 9 aa, synthetic construct
GVPAGLHVF

SEQ ID NO: 54922 - protein, 9 aa, synthetic construct
GVPAGLRLY

SEQ ID NO: 54923 - protein, 9 aa, synthetic construct
GVPAGLRLR

SEQ ID NO: 54924 - protein, 9 aa, synthetic construct
GVPAGLRLH

SEQ ID NO: 54925 - protein, 9 aa, synthetic construct
GVPAGLRLK

SEQ ID NO: 54926 - protein, 9 aa, synthetic construct
GVPAGLRLF

SEQ ID NO: 54927 - protein, 9 aa, synthetic construct
GVPAGLRVY

SEQ ID NO: 54928 - protein, 9 aa, synthetic construct
GVPAGLRVR

SEQ ID NO: 54929 - protein, 9 aa, synthetic construct
GVPAGLRVH

SEQ ID NO: 54930 - protein, 9 aa, synthetic construct
GVPAGLRVK

SEQ ID NO: 54931 - protein, 9 aa, synthetic construct
GVPAGLKLR

SEQ ID NO: 54932 - protein, 9 aa, synthetic construct
GVPAGLKLK

SEQ ID NO: 54933 - protein, 9 aa, synthetic construct
GVPAGLKLF

SEQ ID NO: 54934 - protein, 9 aa, synthetic construct
GVPAGLKVR

SEQ ID NO: 54935 - protein, 9 aa, synthetic construct
GVPAGLKVH

SEQ ID NO: 54936 - protein, 9 aa, synthetic construct
GVPAGLKVK

SEQ ID NO: 54937 - protein, 9 aa, synthetic construct
GVPAGARLR

SEQ ID NO: 54938 - protein, 9 aa, synthetic construct
GVPAGARLK

SEQ ID NO: 54939 - protein, 9 aa, synthetic construct
GVPAGAKLK

SEQ ID NO: 54940 - protein, 9 aa, synthetic construct
GVPAGAKVK

SEQ ID NO: 54941 - protein, 9 aa, synthetic construct
GVPAGIRLR

SEQ ID NO: 54942 - protein, 9 aa, synthetic construct
GVPAGIRLK

SEQ ID NO: 54943 - protein, 9 aa, synthetic construct
GVPAGIRVK

SEQ ID NO: 54944 - protein, 9 aa, synthetic construct
GVPAGIKLR

SEQ ID NO: 54945 - protein, 9 aa, synthetic construct
GVPAGIKVK

SEQ ID NO: 54946 - protein, 9 aa, synthetic construct
GVPAGGHLY

SEQ ID NO: 54947 - protein, 9 aa, synthetic construct
GVPAGGHLR

SEQ ID NO: 54948 - protein, 9 aa, synthetic construct
GVPAGGHLH

SEQ ID NO: 54949 - protein, 9 aa, synthetic construct
GVPAGGHLK

SEQ ID NO: 54950 - protein, 9 aa, synthetic construct
GVPAGGHLF

SEQ ID NO: 54951 - protein, 9 aa, synthetic construct
GVPAGGHVY

SEQ ID NO: 54952 - protein, 9 aa, synthetic construct
GVPAGGHVR

SEQ ID NO: 54953 - protein, 9 aa, synthetic construct
GVPAGGHVH

SEQ ID NO: 54954 - protein, 9 aa, synthetic construct
GVPAGGHVK

SEQ ID NO: 54955 - protein, 9 aa, synthetic construct
GVPAGGHVF

SEQ ID NO: 54956 - protein, 9 aa, synthetic construct
GVPAGGRVR

SEQ ID NO: 54957 - protein, 9 aa, synthetic construct
GINGAVRLK

SEQ ID NO: 54958 - protein, 9 aa, synthetic construct
GINGALHVF

SEQ ID NO: 54959 - protein, 9 aa, synthetic construct
GINGALRLR

SEQ ID NO: 54960 - protein, 9 aa, synthetic construct
GINGALRLF

SEQ ID NO: 54961 - protein, 9 aa, synthetic construct
GINGALRVY

SEQ ID NO: 54962 - protein, 9 aa, synthetic construct
GINGALRVR

SEQ ID NO: 54963 - protein, 9 aa, synthetic construct
GINGALKVR

SEQ ID NO: 54964 - protein, 9 aa, synthetic construct
GINGAAKLR

SEQ ID NO: 54965 - protein, 9 aa, synthetic construct
GINGAAKLK

SEQ ID NO: 54966 - protein, 9 aa, synthetic construct
GINGAAKVR

SEQ ID NO: 54967 - protein, 9 aa, synthetic construct
GINGAIRLR

SEQ ID NO: 54968 - protein, 9 aa, synthetic construct
GINGAIRLK

SEQ ID NO: 54969 - protein, 9 aa, synthetic construct
GINGAIRVR

SEQ ID NO: 54970 - protein, 9 aa, synthetic construct
GINGAIRVK

SEQ ID NO: 54971 - protein, 9 aa, synthetic construct
GINGAIKLK

SEQ ID NO: 54972 - protein, 9 aa, synthetic construct
GINGAGRLK

SEQ ID NO: 54973 - protein, 9 aa, synthetic construct
GINGTVRLR

SEQ ID NO: 54974 - protein, 9 aa, synthetic construct
GINGTVRLK

SEQ ID NO: 54975 - protein, 9 aa, synthetic construct
GINGTVRVR

SEQ ID NO: 54976 - protein, 9 aa, synthetic construct
GINGTLRLR

SEQ ID NO: 54977 - protein, 9 aa, synthetic construct
GINGTLRVR

SEQ ID NO: 54978 - protein, 9 aa, synthetic construct
GINGTLRVH

SEQ ID NO: 54979 - protein, 9 aa, synthetic construct
GINGTLKLK

SEQ ID NO: 54980 - protein, 9 aa, synthetic construct
GINGTLKVR

SEQ ID NO: 54981 - protein, 9 aa, synthetic construct
GINGTAKVH

SEQ ID NO: 54982 - protein, 9 aa, synthetic construct
GINGTIHLY

SEQ ID NO: 54983 - protein, 9 aa, synthetic construct
GINGTIRLR

SEQ ID NO: 54984 - protein, 9 aa, synthetic construct
GINGTIRLK

SEQ ID NO: 54985 - protein, 9 aa, synthetic construct
GINGTIRVR

SEQ ID NO: 54986 - protein, 9 aa, synthetic construct
GINGTIKVR

SEQ ID NO: 54987 - protein, 9 aa, synthetic construct
GINGTIKVK

SEQ ID NO: 54988 - protein, 9 aa, synthetic construct
GINGSVHVH

SEQ ID NO: 54989 - protein, 9 aa, synthetic construct
GINGSVRLR

SEQ ID NO: 54990 - protein, 9 aa, synthetic construct
GINGSVRLK

SEQ ID NO: 54991 - protein, 9 aa, synthetic construct
GINGSVRVR

SEQ ID NO: 54992 - protein, 9 aa, synthetic construct
GINGSLHLY

SEQ ID NO: 54993 - protein, 9 aa, synthetic construct
GINGSLHLF

SEQ ID NO: 54994 - protein, 9 aa, synthetic construct
GINGSLRLY

SEQ ID NO: 54995 - protein, 9 aa, synthetic construct
GINGSLRLR

SEQ ID NO: 54996 - protein, 9 aa, synthetic construct
GINGSLRLH

SEQ ID NO: 54997 - protein, 9 aa, synthetic construct
GINGSLRLK

SEQ ID NO: 54998 - protein, 9 aa, synthetic construct
GINGSLRLF

SEQ ID NO: 54999 - protein, 9 aa, synthetic construct
GINGSLRVY

SEQ ID NO: 55000 - protein, 9 aa, synthetic construct
GINGSLRVR

SEQ ID NO: 55001 - protein, 9 aa, synthetic construct
GINGSLRVH

SEQ ID NO: 55002 - protein, 9 aa, synthetic construct
GINGSLRVK

SEQ ID NO: 55003 - protein, 9 aa, synthetic construct
GINGSLKLR

SEQ ID NO: 55004 - protein, 9 aa, synthetic construct
GINGSLKLK

SEQ ID NO: 55005 - protein, 9 aa, synthetic construct
GINGSARLR

SEQ ID NO: 55006 - protein, 9 aa, synthetic construct
GINGSARVR

SEQ ID NO: 55007 - protein, 9 aa, synthetic construct
GINGSARVK

SEQ ID NO: 55008 - protein, 9 aa, synthetic construct
GINGSAKLK

SEQ ID NO: 55009 - protein, 9 aa, synthetic construct
GINGSIRLR

SEQ ID NO: 55010 - protein, 9 aa, synthetic construct
GINGSGHVY

SEQ ID NO: 55011 - protein, 9 aa, synthetic construct
GINGSGRLH

SEQ ID NO: 55012 - protein, 9 aa, synthetic construct
GINGSGKLR

SEQ ID NO: 55013 - protein, 9 aa, synthetic construct
GINGSGKLK

SEQ ID NO: 55014 - protein, 9 aa, synthetic construct
GINGSGKVR

SEQ ID NO: 55015 - protein, 9 aa, synthetic construct
GINGVVHLF

SEQ ID NO: 55016 - protein, 9 aa, synthetic construct
GINGVVRLY

SEQ ID NO: 55017 - protein, 9 aa, synthetic construct
GINGVVRLR

SEQ ID NO: 55018 - protein, 9 aa, synthetic construct
GINGVVKLR

SEQ ID NO: 55019 - protein, 9 aa, synthetic construct
GINGVVKLK

SEQ ID NO: 55020 - protein, 9 aa, synthetic construct
GINGVVKVR

SEQ ID NO: 55021 - protein, 9 aa, synthetic construct
GINGVLHLY

SEQ ID NO: 55022 - protein, 9 aa, synthetic construct
GINGVLHLR

SEQ ID NO: 55023 - protein, 9 aa, synthetic construct
GINGVLHVF

SEQ ID NO: 55024 - protein, 9 aa, synthetic construct
GINGVLRLR

SEQ ID NO: 55025 - protein, 9 aa, synthetic construct
GINGVLRLK

SEQ ID NO: 55026 - protein, 9 aa, synthetic construct
GINGVLRVR

SEQ ID NO: 55027 - protein, 9 aa, synthetic construct
GINGVLRVK

SEQ ID NO: 55028 - protein, 9 aa, synthetic construct
GINGVLKLR

SEQ ID NO: 55029 - protein, 9 aa, synthetic construct
GINGVLKLF

SEQ ID NO: 55030 - protein, 9 aa, synthetic construct
GINGVARLR

SEQ ID NO: 55031 - protein, 9 aa, synthetic construct
GINGVARLK

SEQ ID NO: 55032 - protein, 9 aa, synthetic construct
GINGVARVK

SEQ ID NO: 55033 - protein, 9 aa, synthetic construct
GINGVAKLY

SEQ ID NO: 55034 - protein, 9 aa, synthetic construct
GINGVAKLR

SEQ ID NO: 55035 - protein, 9 aa, synthetic construct
GINGVAKLK

SEQ ID NO: 55036 - protein, 9 aa, synthetic construct
GINGVAKVR

SEQ ID NO: 55037 - protein, 9 aa, synthetic construct
GINGVAKVK

SEQ ID NO: 55038 - protein, 9 aa, synthetic construct
GINGVIRLR

SEQ ID NO: 55039 - protein, 9 aa, synthetic construct
GINGVIRVR

SEQ ID NO: 55040 - protein, 9 aa, synthetic construct
GINGVIRVF

SEQ ID NO: 55041 - protein, 9 aa, synthetic construct
GINGVIKVR

SEQ ID NO: 55042 - protein, 9 aa, synthetic construct
GINGVGKLK

SEQ ID NO: 55043 - protein, 9 aa, synthetic construct
GINGVGKVK

SEQ ID NO: 55044 - protein, 9 aa, synthetic construct
GINGGVHVH

SEQ ID NO: 55045 - protein, 9 aa, synthetic construct
GINGGLRLY

SEQ ID NO: 55046 - protein, 9 aa, synthetic construct
GINGGLRLR

SEQ ID NO: 55047 - protein, 9 aa, synthetic construct
GINGGLRLH

SEQ ID NO: 55048 - protein, 9 aa, synthetic construct
GINGGLRLK

SEQ ID NO: 55049 - protein, 9 aa, synthetic construct
GINGGLRVY

SEQ ID NO: 55050 - protein, 9 aa, synthetic construct
GINGGLRVR

SEQ ID NO: 55051 - protein, 9 aa, synthetic construct
GINGGLKLR

SEQ ID NO: 55052 - protein, 9 aa, synthetic construct
GINGGLKLK

SEQ ID NO: 55053 - protein, 9 aa, synthetic construct
GINGGARLR

SEQ ID NO: 55054 - protein, 9 aa, synthetic construct
GINGGARLK

SEQ ID NO: 55055 - protein, 9 aa, synthetic construct
GINGGAKLR

SEQ ID NO: 55056 - protein, 9 aa, synthetic construct
GINGGAKVK

SEQ ID NO: 55057 - protein, 9 aa, synthetic construct
GINAAVRLR

SEQ ID NO: 55058 - protein, 9 aa, synthetic construct
GINAAVRLK

SEQ ID NO: 55059 - protein, 9 aa, synthetic construct
GINAALRLR

SEQ ID NO: 55060 - protein, 9 aa, synthetic construct
GINAALRLK

SEQ ID NO: 55061 - protein, 9 aa, synthetic construct
GINAALRVY

SEQ ID NO: 55062 - protein, 9 aa, synthetic construct
GINAALKVR

SEQ ID NO: 55063 - protein, 9 aa, synthetic construct
GINAAAKLR

SEQ ID NO: 55064 - protein, 9 aa, synthetic construct
GINAAAKVR

SEQ ID NO: 55065 - protein, 9 aa, synthetic construct
GINAAIRLK

SEQ ID NO: 55066 - protein, 9 aa, synthetic construct
GINAAIRVK

SEQ ID NO: 55067 - protein, 9 aa, synthetic construct
GINAAGRLR

SEQ ID NO: 55068 - protein, 9 aa, synthetic construct
GINAAGKLR

SEQ ID NO: 55069 - protein, 9 aa, synthetic construct
GINAAGKVR

SEQ ID NO: 55070 - protein, 9 aa, synthetic construct
GINATVRLK

SEQ ID NO: 55071 - protein, 9 aa, synthetic construct
GINATVRVR

SEQ ID NO: 55072 - protein, 9 aa, synthetic construct
GINATVKVR

SEQ ID NO: 55073 - protein, 9 aa, synthetic construct
GINATVKVK

SEQ ID NO: 55074 - protein, 9 aa, synthetic construct
GINATLRLY

SEQ ID NO: 55075 - protein, 9 aa, synthetic construct
GINATLRLK

SEQ ID NO: 55076 - protein, 9 aa, synthetic construct
GINATLRVR

SEQ ID NO: 55077 - protein, 9 aa, synthetic construct
GINATLRVK

SEQ ID NO: 55078 - protein, 9 aa, synthetic construct
GINATLKLR

SEQ ID NO: 55079 - protein, 9 aa, synthetic construct
GINATLKLK

SEQ ID NO: 55080 - protein, 9 aa, synthetic construct
GINATLKVR

SEQ ID NO: 55081 - protein, 9 aa, synthetic construct
GINATLKVK

SEQ ID NO: 55082 - protein, 9 aa, synthetic construct
GINATAKVR

SEQ ID NO: 55083 - protein, 9 aa, synthetic construct
GINATIRLR

SEQ ID NO: 55084 - protein, 9 aa, synthetic construct
GINATIRLK

SEQ ID NO: 55085 - protein, 9 aa, synthetic construct
GINATIKLR

SEQ ID NO: 55086 - protein, 9 aa, synthetic construct
GINATIKLF

SEQ ID NO: 55087 - protein, 9 aa, synthetic construct
GINATGKLR

SEQ ID NO: 55088 - protein, 9 aa, synthetic construct
GINATGKVR

SEQ ID NO: 55089 - protein, 9 aa, synthetic construct
GINASVRLR

SEQ ID NO: 55090 - protein, 9 aa, synthetic construct
GINASLHLF

SEQ ID NO: 55091 - protein, 9 aa, synthetic construct
GINASLRLR

SEQ ID NO: 55092 - protein, 9 aa, synthetic construct
GINASLRLK

SEQ ID NO: 55093 - protein, 9 aa, synthetic construct
GINASLRVY

SEQ ID NO: 55094 - protein, 9 aa, synthetic construct
GINASLRVR

SEQ ID NO: 55095 - protein, 9 aa, synthetic construct
GINASLRVK

SEQ ID NO: 55096 - protein, 9 aa, synthetic construct
GINASLKLK

SEQ ID NO: 55097 - protein, 9 aa, synthetic construct
GINASLKVR

SEQ ID NO: 55098 - protein, 9 aa, synthetic construct
GINASARLK

SEQ ID NO: 55099 - protein, 9 aa, synthetic construct
GINASARVR

SEQ ID NO: 55100 - protein, 9 aa, synthetic construct
GINASARVK

SEQ ID NO: 55101 - protein, 9 aa, synthetic construct
GINASAKLK

SEQ ID NO: 55102 - protein, 9 aa, synthetic construct
GINASAKVR

SEQ ID NO: 55103 - protein, 9 aa, synthetic construct
GINASAKVK

SEQ ID NO: 55104 - protein, 9 aa, synthetic construct
GINASIRVR

SEQ ID NO: 55105 - protein, 9 aa, synthetic construct
GINASIRVH

SEQ ID NO: 55106 - protein, 9 aa, synthetic construct
GINAVVHLR

SEQ ID NO: 55107 - protein, 9 aa, synthetic construct
GINAVVRVH

SEQ ID NO: 55108 - protein, 9 aa, synthetic construct
GINAVVRVK

SEQ ID NO: 55109 - protein, 9 aa, synthetic construct
GINAVVKLK

SEQ ID NO: 55110 - protein, 9 aa, synthetic construct
GINAVVKVR

SEQ ID NO: 55111 - protein, 9 aa, synthetic construct
GINAVLHLY

SEQ ID NO: 55112 - protein, 9 aa, synthetic construct
GINAVLHLR

SEQ ID NO: 55113 - protein, 9 aa, synthetic construct
GINAVLHLH

SEQ ID NO: 55114 - protein, 9 aa, synthetic construct
GINAVLHLK

SEQ ID NO: 55115 - protein, 9 aa, synthetic construct
GINAVLHLF

SEQ ID NO: 55116 - protein, 9 aa, synthetic construct
GINAVLRLY

SEQ ID NO: 55117 - protein, 9 aa, synthetic construct
GINAVLRLR

SEQ ID NO: 55118 - protein, 9 aa, synthetic construct
GINAVLRLK

SEQ ID NO: 55119 - protein, 9 aa, synthetic construct
GINAVLRVR

SEQ ID NO: 55120 - protein, 9 aa, synthetic construct
GINAVLRVK

SEQ ID NO: 55121 - protein, 9 aa, synthetic construct
GINAVLKLK

SEQ ID NO: 55122 - protein, 9 aa, synthetic construct
GINAVAHLF

SEQ ID NO: 55123 - protein, 9 aa, synthetic construct
GINAVARLY

SEQ ID NO: 55124 - protein, 9 aa, synthetic construct
GINAVARLR

SEQ ID NO: 55125 - protein, 9 aa, synthetic construct
GINAVARLH

SEQ ID NO: 55126 - protein, 9 aa, synthetic construct
GINAVARLK

SEQ ID NO: 55127 - protein, 9 aa, synthetic construct
GINAVARLF

SEQ ID NO: 55128 - protein, 9 aa, synthetic construct
GINAVARVY

SEQ ID NO: 55129 - protein, 9 aa, synthetic construct
GINAVARVR

SEQ ID NO: 55130 - protein, 9 aa, synthetic construct
GINAVARVK

SEQ ID NO: 55131 - protein, 9 aa, synthetic construct
GINAVAKLY

SEQ ID NO: 55132 - protein, 9 aa, synthetic construct
GINAVAKLR

SEQ ID NO: 55133 - protein, 9 aa, synthetic construct
GINAVAKVK

SEQ ID NO: 55134 - protein, 9 aa, synthetic construct
GINAVIHLY

SEQ ID NO: 55135 - protein, 9 aa, synthetic construct
GINAVIRVK

SEQ ID NO: 55136 - protein, 9 aa, synthetic construct
GINAVIRVF

SEQ ID NO: 55137 - protein, 9 aa, synthetic construct
GINAVIKVF

SEQ ID NO: 55138 - protein, 9 aa, synthetic construct
GINAVGHLF

SEQ ID NO: 55139 - protein, 9 aa, synthetic construct
GINAVGRLR

SEQ ID NO: 55140 - protein, 9 aa, synthetic construct
GINAVGKLR

SEQ ID NO: 55141 - protein, 9 aa, synthetic construct
GINAVGKLK

SEQ ID NO: 55142 - protein, 9 aa, synthetic construct
GINAVGKVR

SEQ ID NO: 55143 - protein, 9 aa, synthetic construct
GINAGVHLH

SEQ ID NO: 55144 - protein, 9 aa, synthetic construct
GINAGVHVH

SEQ ID NO: 55145 - protein, 9 aa, synthetic construct
GINAGVRLR

SEQ ID NO: 55146 - protein, 9 aa, synthetic construct
GINAGVRLK

SEQ ID NO: 55147 - protein, 9 aa, synthetic construct
GINAGVRVR

SEQ ID NO: 55148 - protein, 9 aa, synthetic construct
GINAGLHLY

SEQ ID NO: 55149 - protein, 9 aa, synthetic construct
GINAGLHLR

SEQ ID NO: 55150 - protein, 9 aa, synthetic construct
GINAGLHLH

SEQ ID NO: 55151 - protein, 9 aa, synthetic construct
GINAGLHLF

SEQ ID NO: 55152 - protein, 9 aa, synthetic construct
GINAGLHVY

SEQ ID NO: 55153 - protein, 9 aa, synthetic construct
GINAGLHVR

SEQ ID NO: 55154 - protein, 9 aa, synthetic construct
GINAGLHVH

SEQ ID NO: 55155 - protein, 9 aa, synthetic construct
GINAGLHVK

SEQ ID NO: 55156 - protein, 9 aa, synthetic construct
GINAGLHVF

SEQ ID NO: 55157 - protein, 9 aa, synthetic construct
GINAGLRLY

SEQ ID NO: 55158 - protein, 9 aa, synthetic construct
GINAGLRLR

SEQ ID NO: 55159 - protein, 9 aa, synthetic construct
GINAGLRLH

SEQ ID NO: 55160 - protein, 9 aa, synthetic construct
GINAGLRLK

SEQ ID NO: 55161 - protein, 9 aa, synthetic construct
GINAGLRLF

SEQ ID NO: 55162 - protein, 9 aa, synthetic construct
GINAGLRVY

SEQ ID NO: 55163 - protein, 9 aa, synthetic construct
GINAGLRVR

SEQ ID NO: 55164 - protein, 9 aa, synthetic construct
GINAGLKLR

SEQ ID NO: 55165 - protein, 9 aa, synthetic construct
GINAGLKLH

SEQ ID NO: 55166 - protein, 9 aa, synthetic construct
GINAGLKLK

SEQ ID NO: 55167 - protein, 9 aa, synthetic construct
GINAGLKVR

SEQ ID NO: 55168 - protein, 9 aa, synthetic construct
GINAGAKLK

SEQ ID NO: 55169 - protein, 9 aa, synthetic construct
GINAGIRLY

SEQ ID NO: 55170 - protein, 9 aa, synthetic construct
GINAGIRLR

SEQ ID NO: 55171 - protein, 9 aa, synthetic construct
GINAGIRLF

SEQ ID NO: 55172 - protein, 9 aa, synthetic construct
GINAGIRVK

SEQ ID NO: 55173 - protein, 9 aa, synthetic construct
GINAGIKLR

SEQ ID NO: 55174 - protein, 9 aa, synthetic construct
GINAGIKVK

SEQ ID NO: 55175 - protein, 9 aa, synthetic construct
GINAGGRLK

SEQ ID NO: 55176 - protein, 9 aa, synthetic construct
GIQGAVRLR

SEQ ID NO: 55177 - protein, 9 aa, synthetic construct
GIQGAVRVK

SEQ ID NO: 55178 - protein, 9 aa, synthetic construct
GIQGAVKLK

SEQ ID NO: 55179 - protein, 9 aa, synthetic construct
GIQGALRLR

SEQ ID NO: 55180 - protein, 9 aa, synthetic construct
GIQGALRLK

SEQ ID NO: 55181 - protein, 9 aa, synthetic construct
GIQGALRVR

SEQ ID NO: 55182 - protein, 9 aa, synthetic construct
GIQGALKLR

SEQ ID NO: 55183 - protein, 9 aa, synthetic construct
GIQGALKVR

SEQ ID NO: 55184 - protein, 9 aa, synthetic construct
GIQGAARLR

SEQ ID NO: 55185 - protein, 9 aa, synthetic construct
GIQGAARLK

SEQ ID NO: 55186 - protein, 9 aa, synthetic construct
GIQGAARVK

SEQ ID NO: 55187 - protein, 9 aa, synthetic construct
GIQGAIRLR

SEQ ID NO: 55188 - protein, 9 aa, synthetic construct
GIQGAGRLR

SEQ ID NO: 55189 - protein, 9 aa, synthetic construct
GIQGTVRLR

SEQ ID NO: 55190 - protein, 9 aa, synthetic construct
GIQGTVRLK

SEQ ID NO: 55191 - protein, 9 aa, synthetic construct
GIQGTVRVR

SEQ ID NO: 55192 - protein, 9 aa, synthetic construct
GIQGTVRVK

SEQ ID NO: 55193 - protein, 9 aa, synthetic construct
GIQGTVKVR

SEQ ID NO: 55194 - protein, 9 aa, synthetic construct
GIQGTLRLR

SEQ ID NO: 55195 - protein, 9 aa, synthetic construct
GIQGTLRVH

SEQ ID NO: 55196 - protein, 9 aa, synthetic construct
GIQGTLKVR

SEQ ID NO: 55197 - protein, 9 aa, synthetic construct
GIQGTARLR

SEQ ID NO: 55198 - protein, 9 aa, synthetic construct
GIQGTARLK

SEQ ID NO: 55199 - protein, 9 aa, synthetic construct
GIQGTIRLR

SEQ ID NO: 55200 - protein, 9 aa, synthetic construct
GIQGTIRVR

SEQ ID NO: 55201 - protein, 9 aa, synthetic construct
GIQGTIKLR

SEQ ID NO: 55202 - protein, 9 aa, synthetic construct
GIQGTIKVR

SEQ ID NO: 55203 - protein, 9 aa, synthetic construct
GIQGSVHVH

SEQ ID NO: 55204 - protein, 9 aa, synthetic construct
GIQGSVRLR

SEQ ID NO: 55205 - protein, 9 aa, synthetic construct
GIQGSVRLK

SEQ ID NO: 55206 - protein, 9 aa, synthetic construct
GIQGSVRVR

SEQ ID NO: 55207 - protein, 9 aa, synthetic construct
GIQGSVKLK

SEQ ID NO: 55208 - protein, 9 aa, synthetic construct
GIQGSLRLR

SEQ ID NO: 55209 - protein, 9 aa, synthetic construct
GIQGSLRLH

SEQ ID NO: 55210 - protein, 9 aa, synthetic construct
GIQGSLRLK

SEQ ID NO: 55211 - protein, 9 aa, synthetic construct
GIQGSLRVR

SEQ ID NO: 55212 - protein, 9 aa, synthetic construct
GIQGSLRVH

SEQ ID NO: 55213 - protein, 9 aa, synthetic construct
GIQGSLKLR

SEQ ID NO: 55214 - protein, 9 aa, synthetic construct
GIQGSLKLK

SEQ ID NO: 55215 - protein, 9 aa, synthetic construct
GIQGSLKVY

SEQ ID NO: 55216 - protein, 9 aa, synthetic construct
GIQGSARLR

SEQ ID NO: 55217 - protein, 9 aa, synthetic construct
GIQGSARLK

SEQ ID NO: 55218 - protein, 9 aa, synthetic construct
GIQGSARVK

SEQ ID NO: 55219 - protein, 9 aa, synthetic construct
GIQGSAKLR

SEQ ID NO: 55220 - protein, 9 aa, synthetic construct
GIQGSAKLK

SEQ ID NO: 55221 - protein, 9 aa, synthetic construct
GIQGSAKVR

SEQ ID NO: 55222 - protein, 9 aa, synthetic construct
GIQGSAKVK

SEQ ID NO: 55223 - protein, 9 aa, synthetic construct
GIQGSIRLR

SEQ ID NO: 55224 - protein, 9 aa, synthetic construct
GIQGSIRVR

SEQ ID NO: 55225 - protein, 9 aa, synthetic construct
GIQGVVHLF

SEQ ID NO: 55226 - protein, 9 aa, synthetic construct
GIQGVVKLR

SEQ ID NO: 55227 - protein, 9 aa, synthetic construct
GIQGVLRLR

SEQ ID NO: 55228 - protein, 9 aa, synthetic construct
GIQGVLRVR

SEQ ID NO: 55229 - protein, 9 aa, synthetic construct
GIQGVLKLK

SEQ ID NO: 55230 - protein, 9 aa, synthetic construct
GIQGVLKVR

SEQ ID NO: 55231 - protein, 9 aa, synthetic construct
GIQGVARVR

SEQ ID NO: 55232 - protein, 9 aa, synthetic construct
GIQGVAKLR

SEQ ID NO: 55233 - protein, 9 aa, synthetic construct
GIQGVIRLR

SEQ ID NO: 55234 - protein, 9 aa, synthetic construct
GIQGVIRVR

SEQ ID NO: 55235 - protein, 9 aa, synthetic construct
GIQGVIKLR

SEQ ID NO: 55236 - protein, 9 aa, synthetic construct
GIQGVIKVR

SEQ ID NO: 55237 - protein, 9 aa, synthetic construct
GIQGVGRLK

SEQ ID NO: 55238 - protein, 9 aa, synthetic construct
GIQGGVHVH

SEQ ID NO: 55239 - protein, 9 aa, synthetic construct
GIQGGVRLR

SEQ ID NO: 55240 - protein, 9 aa, synthetic construct
GIQGGVRLK

SEQ ID NO: 55241 - protein, 9 aa, synthetic construct
GIQGGVRVR

SEQ ID NO: 55242 - protein, 9 aa, synthetic construct
GIQGGLHLY

SEQ ID NO: 55243 - protein, 9 aa, synthetic construct
GIQGGLHLR

SEQ ID NO: 55244 - protein, 9 aa, synthetic construct
GIQGGLRLY

SEQ ID NO: 55245 - protein, 9 aa, synthetic construct
GIQGGLRLR

SEQ ID NO: 55246 - protein, 9 aa, synthetic construct
GIQGGLRLH

SEQ ID NO: 55247 - protein, 9 aa, synthetic construct
GIQGGLRLK

SEQ ID NO: 55248 - protein, 9 aa, synthetic construct
GIQGGLRLF

SEQ ID NO: 55249 - protein, 9 aa, synthetic construct
GIQGGLRVY

SEQ ID NO: 55250 - protein, 9 aa, synthetic construct
GIQGGLRVR

SEQ ID NO: 55251 - protein, 9 aa, synthetic construct
GIQGGLRVF

SEQ ID NO: 55252 - protein, 9 aa, synthetic construct
GIQGGLKLR

SEQ ID NO: 55253 - protein, 9 aa, synthetic construct
GIQGGLKLK

SEQ ID NO: 55254 - protein, 9 aa, synthetic construct
GIQGGLKVK

SEQ ID NO: 55255 - protein, 9 aa, synthetic construct
GIQGGARLR

SEQ ID NO: 55256 - protein, 9 aa, synthetic construct
GIQGGARLK

SEQ ID NO: 55257 - protein, 9 aa, synthetic construct
GIQGGARVK

SEQ ID NO: 55258 - protein, 9 aa, synthetic construct
GIQGGAKLK

SEQ ID NO: 55259 - protein, 9 aa, synthetic construct
GIQGGIKLK

SEQ ID NO: 55260 - protein, 9 aa, synthetic construct
GIQGGGHVK

SEQ ID NO: 55261 - protein, 9 aa, synthetic construct
GIQAAVRLR

SEQ ID NO: 55262 - protein, 9 aa, synthetic construct
GIQAALHLR

SEQ ID NO: 55263 - protein, 9 aa, synthetic construct
GIQAALRLR

SEQ ID NO: 55264 - protein, 9 aa, synthetic construct
GIQAALRLK

SEQ ID NO: 55265 - protein, 9 aa, synthetic construct
GIQAALRVR

SEQ ID NO: 55266 - protein, 9 aa, synthetic construct
GIQAALRVK

SEQ ID NO: 55267 - protein, 9 aa, synthetic construct
GIQAAARLR

SEQ ID NO: 55268 - protein, 9 aa, synthetic construct
GIQAAAKLR

SEQ ID NO: 55269 - protein, 9 aa, synthetic construct
GIQAAAKLK

SEQ ID NO: 55270 - protein, 9 aa, synthetic construct
GIQAAIRLR

SEQ ID NO: 55271 - protein, 9 aa, synthetic construct
GIQAAIRVK

SEQ ID NO: 55272 - protein, 9 aa, synthetic construct
GIQAAGRLR

SEQ ID NO: 55273 - protein, 9 aa, synthetic construct
GIQATVHLF

SEQ ID NO: 55274 - protein, 9 aa, synthetic construct
GIQATVRLR

SEQ ID NO: 55275 - protein, 9 aa, synthetic construct
GIQATVRLK

SEQ ID NO: 55276 - protein, 9 aa, synthetic construct
GIQATVRVR

SEQ ID NO: 55277 - protein, 9 aa, synthetic construct
GIQATVKLR

SEQ ID NO: 55278 - protein, 9 aa, synthetic construct
GIQATVKLK

SEQ ID NO: 55279 - protein, 9 aa, synthetic construct
GIQATVKVR

SEQ ID NO: 55280 - protein, 9 aa, synthetic construct
GIQATVKVH

SEQ ID NO: 55281 - protein, 9 aa, synthetic construct
GIQATLRLY

SEQ ID NO: 55282 - protein, 9 aa, synthetic construct
GIQATLRVY

SEQ ID NO: 55283 - protein, 9 aa, synthetic construct
GIQATLRVR

SEQ ID NO: 55284 - protein, 9 aa, synthetic construct
GIQATLRVK

SEQ ID NO: 55285 - protein, 9 aa, synthetic construct
GIQATLKLK

SEQ ID NO: 55286 - protein, 9 aa, synthetic construct
GIQATLKVY

SEQ ID NO: 55287 - protein, 9 aa, synthetic construct
GIQATLKVR

SEQ ID NO: 55288 - protein, 9 aa, synthetic construct
GIQATLKVK

SEQ ID NO: 55289 - protein, 9 aa, synthetic construct
GIQATARLR

SEQ ID NO: 55290 - protein, 9 aa, synthetic construct
GIQATARVR

SEQ ID NO: 55291 - protein, 9 aa, synthetic construct
GIQATARVK

SEQ ID NO: 55292 - protein, 9 aa, synthetic construct
GIQATAKVK

SEQ ID NO: 55293 - protein, 9 aa, synthetic construct
GIQATIRLK

SEQ ID NO: 55294 - protein, 9 aa, synthetic construct
GIQATIRVY

SEQ ID NO: 55295 - protein, 9 aa, synthetic construct
GIQATIRVR

SEQ ID NO: 55296 - protein, 9 aa, synthetic construct
GIQATIRVK

SEQ ID NO: 55297 - protein, 9 aa, synthetic construct
GIQATIKLR

SEQ ID NO: 55298 - protein, 9 aa, synthetic construct
GIQATIKLK

SEQ ID NO: 55299 - protein, 9 aa, synthetic construct
GIQATIKVR

SEQ ID NO: 55300 - protein, 9 aa, synthetic construct
GIQATGRLR

SEQ ID NO: 55301 - protein, 9 aa, synthetic construct
GIQATGKLK

SEQ ID NO: 55302 - protein, 9 aa, synthetic construct
GIQATGKVR

SEQ ID NO: 55303 - protein, 9 aa, synthetic construct
GIQATGKVK

SEQ ID NO: 55304 - protein, 9 aa, synthetic construct
GIQASVHVH

SEQ ID NO: 55305 - protein, 9 aa, synthetic construct
GIQASVRLK

SEQ ID NO: 55306 - protein, 9 aa, synthetic construct
GIQASLHLR

SEQ ID NO: 55307 - protein, 9 aa, synthetic construct
GIQASLHVF

SEQ ID NO: 55308 - protein, 9 aa, synthetic construct
GIQASLRLR

SEQ ID NO: 55309 - protein, 9 aa, synthetic construct
GIQASLRLH

SEQ ID NO: 55310 - protein, 9 aa, synthetic construct
GIQASLRLK

SEQ ID NO: 55311 - protein, 9 aa, synthetic construct
GIQASLRLF

SEQ ID NO: 55312 - protein, 9 aa, synthetic construct
GIQASLRVY

SEQ ID NO: 55313 - protein, 9 aa, synthetic construct
GIQASLRVH

SEQ ID NO: 55314 - protein, 9 aa, synthetic construct
GIQASLRVK

SEQ ID NO: 55315 - protein, 9 aa, synthetic construct
GIQASLRVF

SEQ ID NO: 55316 - protein, 9 aa, synthetic construct
GIQASLKLR

SEQ ID NO: 55317 - protein, 9 aa, synthetic construct
GIQASLKLK

SEQ ID NO: 55318 - protein, 9 aa, synthetic construct
GIQASLKVR

SEQ ID NO: 55319 - protein, 9 aa, synthetic construct
GIQASARLR

SEQ ID NO: 55320 - protein, 9 aa, synthetic construct
GIQASARVR

SEQ ID NO: 55321 - protein, 9 aa, synthetic construct
GIQASIRLY

SEQ ID NO: 55322 - protein, 9 aa, synthetic construct
GIQASIRLH

SEQ ID NO: 55323 - protein, 9 aa, synthetic construct
GIQASIRVR

SEQ ID NO: 55324 - protein, 9 aa, synthetic construct
GIQASIRVH

SEQ ID NO: 55325 - protein, 9 aa, synthetic construct
GIQASIRVK

SEQ ID NO: 55326 - protein, 9 aa, synthetic construct
GIQASIKLR

SEQ ID NO: 55327 - protein, 9 aa, synthetic construct
GIQASIKLK

SEQ ID NO: 55328 - protein, 9 aa, synthetic construct
GIQASIKVR

SEQ ID NO: 55329 - protein, 9 aa, synthetic construct
GIQASIKVK

SEQ ID NO: 55330 - protein, 9 aa, synthetic construct
GIQASGRLK

SEQ ID NO: 55331 - protein, 9 aa, synthetic construct
GIQAVVHLK

SEQ ID NO: 55332 - protein, 9 aa, synthetic construct
GIQAVVHLF

SEQ ID NO: 55333 - protein, 9 aa, synthetic construct
GIQAVVRLY

SEQ ID NO: 55334 - protein, 9 aa, synthetic construct
GIQAVVRLR

SEQ ID NO: 55335 - protein, 9 aa, synthetic construct
GIQAVVRVR

SEQ ID NO: 55336 - protein, 9 aa, synthetic construct
GIQAVVRVK

SEQ ID NO: 55337 - protein, 9 aa, synthetic construct
GIQAVVKLR

SEQ ID NO: 55338 - protein, 9 aa, synthetic construct
GIQAVVKLK

SEQ ID NO: 55339 - protein, 9 aa, synthetic construct
GIQAVVKLF

SEQ ID NO: 55340 - protein, 9 aa, synthetic construct
GIQAVVKVR

SEQ ID NO: 55341 - protein, 9 aa, synthetic construct
GIQAVVKVK

SEQ ID NO: 55342 - protein, 9 aa, synthetic construct
GIQAVLHLY

SEQ ID NO: 55343 - protein, 9 aa, synthetic construct
GIQAVLHLR

SEQ ID NO: 55344 - protein, 9 aa, synthetic construct
GIQAVLHLH

SEQ ID NO: 55345 - protein, 9 aa, synthetic construct
GIQAVLHLK

SEQ ID NO: 55346 - protein, 9 aa, synthetic construct
GIQAVLHLF

SEQ ID NO: 55347 - protein, 9 aa, synthetic construct
GIQAVLHVY

SEQ ID NO: 55348 - protein, 9 aa, synthetic construct
GIQAVLHVR

SEQ ID NO: 55349 - protein, 9 aa, synthetic construct
GIQAVLHVK

SEQ ID NO: 55350 - protein, 9 aa, synthetic construct
GIQAVLRLR

SEQ ID NO: 55351 - protein, 9 aa, synthetic construct
GIQAVLRLK

SEQ ID NO: 55352 - protein, 9 aa, synthetic construct
GIQAVLRLF

SEQ ID NO: 55353 - protein, 9 aa, synthetic construct
GIQAVLRVK

SEQ ID NO: 55354 - protein, 9 aa, synthetic construct
GIQAVLRVF

SEQ ID NO: 55355 - protein, 9 aa, synthetic construct
GIQAVLKLK

SEQ ID NO: 55356 - protein, 9 aa, synthetic construct
GIQAVLKVR

SEQ ID NO: 55357 - protein, 9 aa, synthetic construct
GIQAVARLR

SEQ ID NO: 55358 - protein, 9 aa, synthetic construct
GIQAVARLH

SEQ ID NO: 55359 - protein, 9 aa, synthetic construct
GIQAVARLK

SEQ ID NO: 55360 - protein, 9 aa, synthetic construct
GIQAVARVR

SEQ ID NO: 55361 - protein, 9 aa, synthetic construct
GIQAVARVK

SEQ ID NO: 55362 - protein, 9 aa, synthetic construct
GIQAVAKLY

SEQ ID NO: 55363 - protein, 9 aa, synthetic construct
GIQAVAKLR

SEQ ID NO: 55364 - protein, 9 aa, synthetic construct
GIQAVAKLK

SEQ ID NO: 55365 - protein, 9 aa, synthetic construct
GIQAVAKVR

SEQ ID NO: 55366 - protein, 9 aa, synthetic construct
GIQAVAKVH

SEQ ID NO: 55367 - protein, 9 aa, synthetic construct
GIQAVAKVK

SEQ ID NO: 55368 - protein, 9 aa, synthetic construct
GIQAVIHLF

SEQ ID NO: 55369 - protein, 9 aa, synthetic construct
GIQAVIRLR

SEQ ID NO: 55370 - protein, 9 aa, synthetic construct
GIQAVIRLH

SEQ ID NO: 55371 - protein, 9 aa, synthetic construct
GIQAVIRVY

SEQ ID NO: 55372 - protein, 9 aa, synthetic construct
GIQAVIRVR

SEQ ID NO: 55373 - protein, 9 aa, synthetic construct
GIQAVIKLR

SEQ ID NO: 55374 - protein, 9 aa, synthetic construct
GIQAVIKVR

SEQ ID NO: 55375 - protein, 9 aa, synthetic construct
GIQAVGHLY

SEQ ID NO: 55376 - protein, 9 aa, synthetic construct
GIQAVGHLF

SEQ ID NO: 55377 - protein, 9 aa, synthetic construct
GIQAVGKLR

SEQ ID NO: 55378 - protein, 9 aa, synthetic construct
GIQAGVHLY

SEQ ID NO: 55379 - protein, 9 aa, synthetic construct
GIQAGVHLR

SEQ ID NO: 55380 - protein, 9 aa, synthetic construct
GIQAGVHLH

SEQ ID NO: 55381 - protein, 9 aa, synthetic construct
GIQAGVHLK

SEQ ID NO: 55382 - protein, 9 aa, synthetic construct
GIQAGVHVH

SEQ ID NO: 55383 - protein, 9 aa, synthetic construct
GIQAGVRLR

SEQ ID NO: 55384 - protein, 9 aa, synthetic construct
GIQAGVRLK

SEQ ID NO: 55385 - protein, 9 aa, synthetic construct
GIQAGLHLY

SEQ ID NO: 55386 - protein, 9 aa, synthetic construct
GIQAGLHLR

SEQ ID NO: 55387 - protein, 9 aa, synthetic construct
GIQAGLHLK

SEQ ID NO: 55388 - protein, 9 aa, synthetic construct
GIQAGLHLF

SEQ ID NO: 55389 - protein, 9 aa, synthetic construct
GIQAGLHVR

SEQ ID NO: 55390 - protein, 9 aa, synthetic construct
GIQAGLHVK

SEQ ID NO: 55391 - protein, 9 aa, synthetic construct
GIQAGLHVF

SEQ ID NO: 55392 - protein, 9 aa, synthetic construct
GIQAGLRLY

SEQ ID NO: 55393 - protein, 9 aa, synthetic construct
GIQAGLRLR

SEQ ID NO: 55394 - protein, 9 aa, synthetic construct
GIQAGLRLK

SEQ ID NO: 55395 - protein, 9 aa, synthetic construct
GIQAGLRLF

SEQ ID NO: 55396 - protein, 9 aa, synthetic construct
GIQAGLRVY

SEQ ID NO: 55397 - protein, 9 aa, synthetic construct
GIQAGLRVR

SEQ ID NO: 55398 - protein, 9 aa, synthetic construct
GIQAGLRVH

SEQ ID NO: 55399 - protein, 9 aa, synthetic construct
GIQAGLRVK

SEQ ID NO: 55400 - protein, 9 aa, synthetic construct
GIQAGLKLY

SEQ ID NO: 55401 - protein, 9 aa, synthetic construct
GIQAGLKLR

SEQ ID NO: 55402 - protein, 9 aa, synthetic construct
GIQAGLKLK

SEQ ID NO: 55403 - protein, 9 aa, synthetic construct
GIQAGLKLF

SEQ ID NO: 55404 - protein, 9 aa, synthetic construct
GIQAGARLR

SEQ ID NO: 55405 - protein, 9 aa, synthetic construct
GIQAGARVK

SEQ ID NO: 55406 - protein, 9 aa, synthetic construct
GIQAGAKLR

SEQ ID NO: 55407 - protein, 9 aa, synthetic construct
GIQAGAKLK

SEQ ID NO: 55408 - protein, 9 aa, synthetic construct
GIQAGIRLR

SEQ ID NO: 55409 - protein, 9 aa, synthetic construct
GIQAGIRVK

SEQ ID NO: 55410 - protein, 9 aa, synthetic construct
GIQAGIKLR

SEQ ID NO: 55411 - protein, 9 aa, synthetic construct
GIQAGIKVK

SEQ ID NO: 55412 - protein, 9 aa, synthetic construct
GIQAGGKLK

SEQ ID NO: 55413 - protein, 9 aa, synthetic construct
GIQAGGKVR

SEQ ID NO: 55414 - protein, 9 aa, synthetic construct
GIPGAVRLR

SEQ ID NO: 55415 - protein, 9 aa, synthetic construct
GIPGAVRLK

SEQ ID NO: 55416 - protein, 9 aa, synthetic construct
GIPGAVKLK

SEQ ID NO: 55417 - protein, 9 aa, synthetic construct
GIPGALRLR

SEQ ID NO: 55418 - protein, 9 aa, synthetic construct
GIPGALRLK

SEQ ID NO: 55419 - protein, 9 aa, synthetic construct
GIPGALKLK

SEQ ID NO: 55420 - protein, 9 aa, synthetic construct
GIPGAGRLK

SEQ ID NO: 55421 - protein, 9 aa, synthetic construct
GIPGTVRLR

SEQ ID NO: 55422 - protein, 9 aa, synthetic construct
GIPGTVKLR

SEQ ID NO: 55423 - protein, 9 aa, synthetic construct
GIPGTVKLK

SEQ ID NO: 55424 - protein, 9 aa, synthetic construct
GIPGTLKVR

SEQ ID NO: 55425 - protein, 9 aa, synthetic construct
GIPGTLKVK

SEQ ID NO: 55426 - protein, 9 aa, synthetic construct
GIPGTARLK

SEQ ID NO: 55427 - protein, 9 aa, synthetic construct
GIPGTAKVR

SEQ ID NO: 55428 - protein, 9 aa, synthetic construct
GIPGTIRLK

SEQ ID NO: 55429 - protein, 9 aa, synthetic construct
GIPGTIKVK

SEQ ID NO: 55430 - protein, 9 aa, synthetic construct
GIPGTGRLR

SEQ ID NO: 55431 - protein, 9 aa, synthetic construct
GIPGSVHVH

SEQ ID NO: 55432 - protein, 9 aa, synthetic construct
GIPGSVRLR

SEQ ID NO: 55433 - protein, 9 aa, synthetic construct
GIPGSVRLK

SEQ ID NO: 55434 - protein, 9 aa, synthetic construct
GIPGSLRLR

SEQ ID NO: 55435 - protein, 9 aa, synthetic construct
GIPGSLRLK

SEQ ID NO: 55436 - protein, 9 aa, synthetic construct
GIPGSARLR

SEQ ID NO: 55437 - protein, 9 aa, synthetic construct
GIPGSARVR

SEQ ID NO: 55438 - protein, 9 aa, synthetic construct
GIPGSAKLR

SEQ ID NO: 55439 - protein, 9 aa, synthetic construct
GIPGSAKLK

SEQ ID NO: 55440 - protein, 9 aa, synthetic construct
GIPGSAKVK

SEQ ID NO: 55441 - protein, 9 aa, synthetic construct
GIPGSIRLK

SEQ ID NO: 55442 - protein, 9 aa, synthetic construct
GIPGSIRVK

SEQ ID NO: 55443 - protein, 9 aa, synthetic construct
GIPGSIKLR

SEQ ID NO: 55444 - protein, 9 aa, synthetic construct
GIPGSGRVR

SEQ ID NO: 55445 - protein, 9 aa, synthetic construct
GIPGSGKLK

SEQ ID NO: 55446 - protein, 9 aa, synthetic construct
GIPGSGKVR

SEQ ID NO: 55447 - protein, 9 aa, synthetic construct
GIPGVVRLR

SEQ ID NO: 55448 - protein, 9 aa, synthetic construct
GIPGVVRLK

SEQ ID NO: 55449 - protein, 9 aa, synthetic construct
GIPGVVRVR

SEQ ID NO: 55450 - protein, 9 aa, synthetic construct
GIPGVLHLR

SEQ ID NO: 55451 - protein, 9 aa, synthetic construct
GIPGVLRLR

SEQ ID NO: 55452 - protein, 9 aa, synthetic construct
GIPGVAHVY

SEQ ID NO: 55453 - protein, 9 aa, synthetic construct
GIPGVARLK

SEQ ID NO: 55454 - protein, 9 aa, synthetic construct
GIPGVARVY

SEQ ID NO: 55455 - protein, 9 aa, synthetic construct
GIPGVARVR

SEQ ID NO: 55456 - protein, 9 aa, synthetic construct
GIPGVARVK

SEQ ID NO: 55457 - protein, 9 aa, synthetic construct
GIPGVAKLR

SEQ ID NO: 55458 - protein, 9 aa, synthetic construct
GIPGVAKLK

SEQ ID NO: 55459 - protein, 9 aa, synthetic construct
GIPGVAKVK

SEQ ID NO: 55460 - protein, 9 aa, synthetic construct
GIPGVIRLF

SEQ ID NO: 55461 - protein, 9 aa, synthetic construct
GIPGVIRVR

SEQ ID NO: 55462 - protein, 9 aa, synthetic construct
GIPGVIKVR

SEQ ID NO: 55463 - protein, 9 aa, synthetic construct
GIPGVGHLY

SEQ ID NO: 55464 - protein, 9 aa, synthetic construct
GIPGVGRLR

SEQ ID NO: 55465 - protein, 9 aa, synthetic construct
GIPGVGRLK

SEQ ID NO: 55466 - protein, 9 aa, synthetic construct
GIPGVGKLR

SEQ ID NO: 55467 - protein, 9 aa, synthetic construct
GIPGVGKVK

SEQ ID NO: 55468 - protein, 9 aa, synthetic construct
GIPGGVHVH

SEQ ID NO: 55469 - protein, 9 aa, synthetic construct
GIPGGVKVR

SEQ ID NO: 55470 - protein, 9 aa, synthetic construct
GIPGGLHLR

SEQ ID NO: 55471 - protein, 9 aa, synthetic construct
GIPGGLHLK

SEQ ID NO: 55472 - protein, 9 aa, synthetic construct
GIPGGLRLR

SEQ ID NO: 55473 - protein, 9 aa, synthetic construct
GIPGGLRLK

SEQ ID NO: 55474 - protein, 9 aa, synthetic construct
GIPGGLRVR

SEQ ID NO: 55475 - protein, 9 aa, synthetic construct
GIPGGLRVH

SEQ ID NO: 55476 - protein, 9 aa, synthetic construct
GIPGGLRVK

SEQ ID NO: 55477 - protein, 9 aa, synthetic construct
GIPGGLRVF

SEQ ID NO: 55478 - protein, 9 aa, synthetic construct
GIPGGLKLR

SEQ ID NO: 55479 - protein, 9 aa, synthetic construct
GIPGGLKLK

SEQ ID NO: 55480 - protein, 9 aa, synthetic construct
GIPGGLKLF

SEQ ID NO: 55481 - protein, 9 aa, synthetic construct
GIPGGLKVR

SEQ ID NO: 55482 - protein, 9 aa, synthetic construct
GIPGGLKVK

SEQ ID NO: 55483 - protein, 9 aa, synthetic construct
GIPGGAKLK

SEQ ID NO: 55484 - protein, 9 aa, synthetic construct
GIPGGAKVK

SEQ ID NO: 55485 - protein, 9 aa, synthetic construct
GIPGGIRLR

SEQ ID NO: 55486 - protein, 9 aa, synthetic construct
GIPGGIKLK

SEQ ID NO: 55487 - protein, 9 aa, synthetic construct
GIPAAVRLR

SEQ ID NO: 55488 - protein, 9 aa, synthetic construct
GIPAAVRLK

SEQ ID NO: 55489 - protein, 9 aa, synthetic construct
GIPAAVRVK

SEQ ID NO: 55490 - protein, 9 aa, synthetic construct
GIPAALRVR

SEQ ID NO: 55491 - protein, 9 aa, synthetic construct
GIPAALKLR

SEQ ID NO: 55492 - protein, 9 aa, synthetic construct
GIPAALKLK

SEQ ID NO: 55493 - protein, 9 aa, synthetic construct
GIPAALKVR

SEQ ID NO: 55494 - protein, 9 aa, synthetic construct
GIPAAGRLR

SEQ ID NO: 55495 - protein, 9 aa, synthetic construct
GIPATVRLK

SEQ ID NO: 55496 - protein, 9 aa, synthetic construct
GIPATVRVR

SEQ ID NO: 55497 - protein, 9 aa, synthetic construct
GIPATVKLK

SEQ ID NO: 55498 - protein, 9 aa, synthetic construct
GIPATVKVK

SEQ ID NO: 55499 - protein, 9 aa, synthetic construct
GIPATLHLY

SEQ ID NO: 55500 - protein, 9 aa, synthetic construct
GIPATLRVR

SEQ ID NO: 55501 - protein, 9 aa, synthetic construct
GIPATLKLR

SEQ ID NO: 55502 - protein, 9 aa, synthetic construct
GIPATARLR

SEQ ID NO: 55503 - protein, 9 aa, synthetic construct
GIPATARVK

SEQ ID NO: 55504 - protein, 9 aa, synthetic construct
GIPATAKLR

SEQ ID NO: 55505 - protein, 9 aa, synthetic construct
GIPATAKLK

SEQ ID NO: 55506 - protein, 9 aa, synthetic construct
GIPATIKVR

SEQ ID NO: 55507 - protein, 9 aa, synthetic construct
GIPATGKVR

SEQ ID NO: 55508 - protein, 9 aa, synthetic construct
GIPATGKVK

SEQ ID NO: 55509 - protein, 9 aa, synthetic construct
GIPASVHLF

SEQ ID NO: 55510 - protein, 9 aa, synthetic construct
GIPASVHVH

SEQ ID NO: 55511 - protein, 9 aa, synthetic construct
GIPASVRLK

SEQ ID NO: 55512 - protein, 9 aa, synthetic construct
GIPASVRVR

SEQ ID NO: 55513 - protein, 9 aa, synthetic construct
GIPASVKLK

SEQ ID NO: 55514 - protein, 9 aa, synthetic construct
GIPASLHLF

SEQ ID NO: 55515 - protein, 9 aa, synthetic construct
GIPASLRLY

SEQ ID NO: 55516 - protein, 9 aa, synthetic construct
GIPASLRLR

SEQ ID NO: 55517 - protein, 9 aa, synthetic construct
GIPASLRLK

SEQ ID NO: 55518 - protein, 9 aa, synthetic construct
GIPASLRLF

SEQ ID NO: 55519 - protein, 9 aa, synthetic construct
GIPASLRVY

SEQ ID NO: 55520 - protein, 9 aa, synthetic construct
GIPASLRVR

SEQ ID NO: 55521 - protein, 9 aa, synthetic construct
GIPASLRVK

SEQ ID NO: 55522 - protein, 9 aa, synthetic construct
GIPASLKLR

SEQ ID NO: 55523 - protein, 9 aa, synthetic construct
GIPASLKLK

SEQ ID NO: 55524 - protein, 9 aa, synthetic construct
GIPASLKLF

SEQ ID NO: 55525 - protein, 9 aa, synthetic construct
GIPASLKVR

SEQ ID NO: 55526 - protein, 9 aa, synthetic construct
GIPASLKVK

SEQ ID NO: 55527 - protein, 9 aa, synthetic construct
GIPASARVR

SEQ ID NO: 55528 - protein, 9 aa, synthetic construct
GIPASAKLK

SEQ ID NO: 55529 - protein, 9 aa, synthetic construct
GIPASAKVR

SEQ ID NO: 55530 - protein, 9 aa, synthetic construct
GIPASAKVK

SEQ ID NO: 55531 - protein, 9 aa, synthetic construct
GIPASIRLR

SEQ ID NO: 55532 - protein, 9 aa, synthetic construct
GIPASIRLK

SEQ ID NO: 55533 - protein, 9 aa, synthetic construct
GIPASIKLR

SEQ ID NO: 55534 - protein, 9 aa, synthetic construct
GIPASGRLK

SEQ ID NO: 55535 - protein, 9 aa, synthetic construct
GIPASGRVR

SEQ ID NO: 55536 - protein, 9 aa, synthetic construct
GIPASGKLR

SEQ ID NO: 55537 - protein, 9 aa, synthetic construct
GIPAVVHLR

SEQ ID NO: 55538 - protein, 9 aa, synthetic construct
GIPAVVRLR

SEQ ID NO: 55539 - protein, 9 aa, synthetic construct
GIPAVVRVK

SEQ ID NO: 55540 - protein, 9 aa, synthetic construct
GIPAVVKLR

SEQ ID NO: 55541 - protein, 9 aa, synthetic construct
GIPAVVKVR

SEQ ID NO: 55542 - protein, 9 aa, synthetic construct
GIPAVLHLY

SEQ ID NO: 55543 - protein, 9 aa, synthetic construct
GIPAVLHLR

SEQ ID NO: 55544 - protein, 9 aa, synthetic construct
GIPAVLHLH

SEQ ID NO: 55545 - protein, 9 aa, synthetic construct
GIPAVLHLK

SEQ ID NO: 55546 - protein, 9 aa, synthetic construct
GIPAVLHLF

SEQ ID NO: 55547 - protein, 9 aa, synthetic construct
GIPAVLHVK

SEQ ID NO: 55548 - protein, 9 aa, synthetic construct
GIPAVLHVF

SEQ ID NO: 55549 - protein, 9 aa, synthetic construct
GIPAVLRLY

SEQ ID NO: 55550 - protein, 9 aa, synthetic construct
GIPAVLRLR

SEQ ID NO: 55551 - protein, 9 aa, synthetic construct
GIPAVLRLH

SEQ ID NO: 55552 - protein, 9 aa, synthetic construct
GIPAVLRLK

SEQ ID NO: 55553 - protein, 9 aa, synthetic construct
GIPAVLRLF

SEQ ID NO: 55554 - protein, 9 aa, synthetic construct
GIPAVLRVY

SEQ ID NO: 55555 - protein, 9 aa, synthetic construct
GIPAVLRVF

SEQ ID NO: 55556 - protein, 9 aa, synthetic construct
GIPAVLKLR

SEQ ID NO: 55557 - protein, 9 aa, synthetic construct
GIPAVLKLK

SEQ ID NO: 55558 - protein, 9 aa, synthetic construct
GIPAVAHLF

SEQ ID NO: 55559 - protein, 9 aa, synthetic construct
GIPAVARLR

SEQ ID NO: 55560 - protein, 9 aa, synthetic construct
GIPAVARLK

SEQ ID NO: 55561 - protein, 9 aa, synthetic construct
GIPAVARVR

SEQ ID NO: 55562 - protein, 9 aa, synthetic construct
GIPAVARVK

SEQ ID NO: 55563 - protein, 9 aa, synthetic construct
GIPAVAKLK

SEQ ID NO: 55564 - protein, 9 aa, synthetic construct
GIPAVAKVK

SEQ ID NO: 55565 - protein, 9 aa, synthetic construct
GIPAVIKLR

SEQ ID NO: 55566 - protein, 9 aa, synthetic construct
GIPAVIKLF

SEQ ID NO: 55567 - protein, 9 aa, synthetic construct
GIPAVIKVK

SEQ ID NO: 55568 - protein, 9 aa, synthetic construct
GIPAVGRLR

SEQ ID NO: 55569 - protein, 9 aa, synthetic construct
GIPAVGRLK

SEQ ID NO: 55570 - protein, 9 aa, synthetic construct
GIPAVGKLR

SEQ ID NO: 55571 - protein, 9 aa, synthetic construct
GIPAGVHLR

SEQ ID NO: 55572 - protein, 9 aa, synthetic construct
GIPAGVHLH

SEQ ID NO: 55573 - protein, 9 aa, synthetic construct
GIPAGVHLK

SEQ ID NO: 55574 - protein, 9 aa, synthetic construct
GIPAGVHLF

SEQ ID NO: 55575 - protein, 9 aa, synthetic construct
GIPAGVHVH

SEQ ID NO: 55576 - protein, 9 aa, synthetic construct
GIPAGVRLY

SEQ ID NO: 55577 - protein, 9 aa, synthetic construct
GIPAGVRLR

SEQ ID NO: 55578 - protein, 9 aa, synthetic construct
GIPAGVRLK

SEQ ID NO: 55579 - protein, 9 aa, synthetic construct
GIPAGVKLK

SEQ ID NO: 55580 - protein, 9 aa, synthetic construct
GIPAGLHLY

SEQ ID NO: 55581 - protein, 9 aa, synthetic construct
GIPAGLHLR

SEQ ID NO: 55582 - protein, 9 aa, synthetic construct
GIPAGLHLH

SEQ ID NO: 55583 - protein, 9 aa, synthetic construct
GIPAGLHLK

SEQ ID NO: 55584 - protein, 9 aa, synthetic construct
GIPAGLHLF

SEQ ID NO: 55585 - protein, 9 aa, synthetic construct
GIPAGLHVH

SEQ ID NO: 55586 - protein, 9 aa, synthetic construct
GIPAGLHVK

SEQ ID NO: 55587 - protein, 9 aa, synthetic construct
GIPAGLHVF

SEQ ID NO: 55588 - protein, 9 aa, synthetic construct
GIPAGLRLY

SEQ ID NO: 55589 - protein, 9 aa, synthetic construct
GIPAGLRLR

SEQ ID NO: 55590 - protein, 9 aa, synthetic construct
GIPAGLRLH

SEQ ID NO: 55591 - protein, 9 aa, synthetic construct
GIPAGLRLK

SEQ ID NO: 55592 - protein, 9 aa, synthetic construct
GIPAGLRLF

SEQ ID NO: 55593 - protein, 9 aa, synthetic construct
GIPAGLRVR

SEQ ID NO: 55594 - protein, 9 aa, synthetic construct
GIPAGLRVK

SEQ ID NO: 55595 - protein, 9 aa, synthetic construct
GIPAGLKLY

SEQ ID NO: 55596 - protein, 9 aa, synthetic construct
GIPAGLKLR

SEQ ID NO: 55597 - protein, 9 aa, synthetic construct
GIPAGLKLH

SEQ ID NO: 55598 - protein, 9 aa, synthetic construct
GIPAGLKLK

SEQ ID NO: 55599 - protein, 9 aa, synthetic construct
GIPAGLKVR

SEQ ID NO: 55600 - protein, 9 aa, synthetic construct
GIPAGLKVK

SEQ ID NO: 55601 - protein, 9 aa, synthetic construct
GIPAGARLR

SEQ ID NO: 55602 - protein, 9 aa, synthetic construct
GIPAGARLK

SEQ ID NO: 55603 - protein, 9 aa, synthetic construct
GIPAGARVK

SEQ ID NO: 55604 - protein, 9 aa, synthetic construct
GIPAGAKLK

SEQ ID NO: 55605 - protein, 9 aa, synthetic construct
GIPAGAKVR

SEQ ID NO: 55606 - protein, 9 aa, synthetic construct
GIPAGIRLR

SEQ ID NO: 55607 - protein, 9 aa, synthetic construct
GIPAGIRLK

SEQ ID NO: 55608 - protein, 9 aa, synthetic construct
GIPAGIRLF

SEQ ID NO: 55609 - protein, 9 aa, synthetic construct
GIPAGIRVK

SEQ ID NO: 55610 - protein, 9 aa, synthetic construct
GIPAGIKLR

SEQ ID NO: 55611 - protein, 9 aa, synthetic construct
GIPAGGRLR

SEQ ID NO: 55612 - protein, 9 aa, synthetic construct
GIPAGGRLK

SEQ ID NO: 55613 - protein, 9 aa, synthetic construct
GIPAGGRVR

SEQ ID NO: 55614 - protein, 9 aa, synthetic construct
GIPAGGRVK

SEQ ID NO: 55615 - protein, 9 aa, synthetic construct
GIPAGGKLR

SEQ ID NO: 55616 - protein, 9 aa, synthetic construct
GIPAGGKVR

SEQ ID NO: 55617 - protein, 9 aa, synthetic construct
PLNGASHLR

SEQ ID NO: 55618 - protein, 9 aa, synthetic construct
PLNGASHVH

SEQ ID NO: 55619 - protein, 9 aa, synthetic construct
PLNGASRLY

SEQ ID NO: 55620 - protein, 9 aa, synthetic construct
PLNGASRLR

SEQ ID NO: 55621 - protein, 9 aa, synthetic construct
PLNGASRLH

SEQ ID NO: 55622 - protein, 9 aa, synthetic construct
PLNGASRLK

SEQ ID NO: 55623 - protein, 9 aa, synthetic construct
PLNGASRVR

SEQ ID NO: 55624 - protein, 9 aa, synthetic construct
PLNGASRVK

SEQ ID NO: 55625 - protein, 9 aa, synthetic construct
PLNGASKLR

SEQ ID NO: 55626 - protein, 9 aa, synthetic construct
PLNGATRVK

SEQ ID NO: 55627 - protein, 9 aa, synthetic construct
PLNGATKLK

SEQ ID NO: 55628 - protein, 9 aa, synthetic construct
PLNGTSHLF

SEQ ID NO: 55629 - protein, 9 aa, synthetic construct
PLNGTSHVF

SEQ ID NO: 55630 - protein, 9 aa, synthetic construct
PLNGTSRLY

SEQ ID NO: 55631 - protein, 9 aa, synthetic construct
PLNGTSRLK

SEQ ID NO: 55632 - protein, 9 aa, synthetic construct
PLNGTSRVR

SEQ ID NO: 55633 - protein, 9 aa, synthetic construct
PLNGTSRVK

SEQ ID NO: 55634 - protein, 9 aa, synthetic construct
PLNGTSKLK

SEQ ID NO: 55635 - protein, 9 aa, synthetic construct
PLNGTTRVR

SEQ ID NO: 55636 - protein, 9 aa, synthetic construct
PLNGTTRVK

SEQ ID NO: 55637 - protein, 9 aa, synthetic construct
PLNGTTKVR

SEQ ID NO: 55638 - protein, 9 aa, synthetic construct
PLNGSSHVY

SEQ ID NO: 55639 - protein, 9 aa, synthetic construct
PLNGSSRLR

SEQ ID NO: 55640 - protein, 9 aa, synthetic construct
PLNGSSRLH

SEQ ID NO: 55641 - protein, 9 aa, synthetic construct
PLNGSSRLK

SEQ ID NO: 55642 - protein, 9 aa, synthetic construct
PLNGSSRVR

SEQ ID NO: 55643 - protein, 9 aa, synthetic construct
PLNGSSRVK

SEQ ID NO: 55644 - protein, 9 aa, synthetic construct
PLNGSSKLR

SEQ ID NO: 55645 - protein, 9 aa, synthetic construct
PLNGSSKLK

SEQ ID NO: 55646 - protein, 9 aa, synthetic construct
PLNGSSKVR

SEQ ID NO: 55647 - protein, 9 aa, synthetic construct
PLNGSSKVK

SEQ ID NO: 55648 - protein, 9 aa, synthetic construct
PLNGSTRLH

SEQ ID NO: 55649 - protein, 9 aa, synthetic construct
PLNGSTRLK

SEQ ID NO: 55650 - protein, 9 aa, synthetic construct
PLNGSTRVR

SEQ ID NO: 55651 - protein, 9 aa, synthetic construct
PLNGSTKLK

SEQ ID NO: 55652 - protein, 9 aa, synthetic construct
PLNGSTKVK

SEQ ID NO: 55653 - protein, 9 aa, synthetic construct
PLNGVSRLR

SEQ ID NO: 55654 - protein, 9 aa, synthetic construct
PLNGVSRVR

SEQ ID NO: 55655 - protein, 9 aa, synthetic construct
PLNGVSRVK

SEQ ID NO: 55656 - protein, 9 aa, synthetic construct
PLNGVSKVK

SEQ ID NO: 55657 - protein, 9 aa, synthetic construct
PLNGVTHVY

SEQ ID NO: 55658 - protein, 9 aa, synthetic construct
PLNGVTRLR

SEQ ID NO: 55659 - protein, 9 aa, synthetic construct
PLNGVTRVR

SEQ ID NO: 55660 - protein, 9 aa, synthetic construct
PLNGVTKVR

SEQ ID NO: 55661 - protein, 9 aa, synthetic construct
PLNGVTKVK

SEQ ID NO: 55662 - protein, 9 aa, synthetic construct
PLNGGSHLY

SEQ ID NO: 55663 - protein, 9 aa, synthetic construct
PLNGGSHLF

SEQ ID NO: 55664 - protein, 9 aa, synthetic construct
PLNGGSHVH

SEQ ID NO: 55665 - protein, 9 aa, synthetic construct
PLNGGSKLK

SEQ ID NO: 55666 - protein, 9 aa, synthetic construct
PLNGGSKVR

SEQ ID NO: 55667 - protein, 9 aa, synthetic construct
PLNGGSKVK

SEQ ID NO: 55668 - protein, 9 aa, synthetic construct
PLNGGTRLR

SEQ ID NO: 55669 - protein, 9 aa, synthetic construct
PLNGGTRLK

SEQ ID NO: 55670 - protein, 9 aa, synthetic construct
PLNGGTKVR

SEQ ID NO: 55671 - protein, 9 aa, synthetic construct
PLQGASRLY

SEQ ID NO: 55672 - protein, 9 aa, synthetic construct
PLQGASRLR

SEQ ID NO: 55673 - protein, 9 aa, synthetic construct
PLQGASRLK

SEQ ID NO: 55674 - protein, 9 aa, synthetic construct
PLQGASRVY

SEQ ID NO: 55675 - protein, 9 aa, synthetic construct
PLQGASKLR

SEQ ID NO: 55676 - protein, 9 aa, synthetic construct
PLQGASKLH

SEQ ID NO: 55677 - protein, 9 aa, synthetic construct
PLQGASKLK

SEQ ID NO: 55678 - protein, 9 aa, synthetic construct
PLQGATRLR

SEQ ID NO: 55679 - protein, 9 aa, synthetic construct
PLQGATRLK

SEQ ID NO: 55680 - protein, 9 aa, synthetic construct
PLQGATRVR

SEQ ID NO: 55681 - protein, 9 aa, synthetic construct
PLQGATRVK

SEQ ID NO: 55682 - protein, 9 aa, synthetic construct
PLQGATKLR

SEQ ID NO: 55683 - protein, 9 aa, synthetic construct
PLQGATKVK

SEQ ID NO: 55684 - protein, 9 aa, synthetic construct
PLQGTSRLR

SEQ ID NO: 55685 - protein, 9 aa, synthetic construct
PLQGTSRLK

SEQ ID NO: 55686 - protein, 9 aa, synthetic construct
PLQGTSRVR

SEQ ID NO: 55687 - protein, 9 aa, synthetic construct
PLQGTSRVK

SEQ ID NO: 55688 - protein, 9 aa, synthetic construct
PLQGTSKLR

SEQ ID NO: 55689 - protein, 9 aa, synthetic construct
PLQGTSKLK

SEQ ID NO: 55690 - protein, 9 aa, synthetic construct
PLQGTSKVR

SEQ ID NO: 55691 - protein, 9 aa, synthetic construct
PLQGTSKVH

SEQ ID NO: 55692 - protein, 9 aa, synthetic construct
PLQGTSKVK

SEQ ID NO: 55693 - protein, 9 aa, synthetic construct
PLQGTTRLR

SEQ ID NO: 55694 - protein, 9 aa, synthetic construct
PLQGTTRVR

SEQ ID NO: 55695 - protein, 9 aa, synthetic construct
PLQGTTRVK

SEQ ID NO: 55696 - protein, 9 aa, synthetic construct
PLQGTTKLK

SEQ ID NO: 55697 - protein, 9 aa, synthetic construct
PLQGTTKVR

SEQ ID NO: 55698 - protein, 9 aa, synthetic construct
PLQGTTKVK

SEQ ID NO: 55699 - protein, 9 aa, synthetic construct
PLQGSSRVR

SEQ ID NO: 55700 - protein, 9 aa, synthetic construct
PLQGSSKLR

SEQ ID NO: 55701 - protein, 9 aa, synthetic construct
PLQGSSKVR

SEQ ID NO: 55702 - protein, 9 aa, synthetic construct
PLQGSSKVK

SEQ ID NO: 55703 - protein, 9 aa, synthetic construct
PLQGSTRLR

SEQ ID NO: 55704 - protein, 9 aa, synthetic construct
PLQGSTRLK

SEQ ID NO: 55705 - protein, 9 aa, synthetic construct
PLQGSTRVR

SEQ ID NO: 55706 - protein, 9 aa, synthetic construct
PLQGSTRVH

SEQ ID NO: 55707 - protein, 9 aa, synthetic construct
PLQGSTRVK

SEQ ID NO: 55708 - protein, 9 aa, synthetic construct
PLQGSTKLR

SEQ ID NO: 55709 - protein, 9 aa, synthetic construct
PLQGSTKLK

SEQ ID NO: 55710 - protein, 9 aa, synthetic construct
PLQGSTKVR

SEQ ID NO: 55711 - protein, 9 aa, synthetic construct
PLQGVSHLF

SEQ ID NO: 55712 - protein, 9 aa, synthetic construct
PLQGVSHVR

SEQ ID NO: 55713 - protein, 9 aa, synthetic construct
PLQGVSRLR

SEQ ID NO: 55714 - protein, 9 aa, synthetic construct
PLQGVSRLH

SEQ ID NO: 55715 - protein, 9 aa, synthetic construct
PLQGVSRLK

SEQ ID NO: 55716 - protein, 9 aa, synthetic construct
PLQGVSRVK

SEQ ID NO: 55717 - protein, 9 aa, synthetic construct
PLQGVSKLY

SEQ ID NO: 55718 - protein, 9 aa, synthetic construct
PLQGVSKVR

SEQ ID NO: 55719 - protein, 9 aa, synthetic construct
PLQGVSKVH

SEQ ID NO: 55720 - protein, 9 aa, synthetic construct
PLQGVSKVK

SEQ ID NO: 55721 - protein, 9 aa, synthetic construct
PLQGVTRLR

SEQ ID NO: 55722 - protein, 9 aa, synthetic construct
PLQGVTRLK

SEQ ID NO: 55723 - protein, 9 aa, synthetic construct
PLQGVTRVR

SEQ ID NO: 55724 - protein, 9 aa, synthetic construct
PLQGVTRVK

SEQ ID NO: 55725 - protein, 9 aa, synthetic construct
PLQGGSRLK

SEQ ID NO: 55726 - protein, 9 aa, synthetic construct
PLQGGSRVR

SEQ ID NO: 55727 - protein, 9 aa, synthetic construct
PLQGGSRVK

SEQ ID NO: 55728 - protein, 9 aa, synthetic construct
PLQGGSKLK

SEQ ID NO: 55729 - protein, 9 aa, synthetic construct
PLQGGSKVR

SEQ ID NO: 55730 - protein, 9 aa, synthetic construct
PLQGGTRLR

SEQ ID NO: 55731 - protein, 9 aa, synthetic construct
PLQGGTRLK

SEQ ID NO: 55732 - protein, 9 aa, synthetic construct
PLQGGTRVK

SEQ ID NO: 55733 - protein, 9 aa, synthetic construct
PLQGGTKLK

SEQ ID NO: 55734 - protein, 9 aa, synthetic construct
PLQGGTKVK

SEQ ID NO: 55735 - protein, 9 aa, synthetic construct
PTNGASRLK

SEQ ID NO: 55736 - protein, 9 aa, synthetic construct
PTNGASRVR

SEQ ID NO: 55737 - protein, 9 aa, synthetic construct
PTNGASKLR

SEQ ID NO: 55738 - protein, 9 aa, synthetic construct
PTNGASKLK

SEQ ID NO: 55739 - protein, 9 aa, synthetic construct
PTNGASKVK

SEQ ID NO: 55740 - protein, 9 aa, synthetic construct
PTNGATRLK

SEQ ID NO: 55741 - protein, 9 aa, synthetic construct
PTNGATKLK

SEQ ID NO: 55742 - protein, 9 aa, synthetic construct
PTNGTSRLR

SEQ ID NO: 55743 - protein, 9 aa, synthetic construct
PTNGTSRLK

SEQ ID NO: 55744 - protein, 9 aa, synthetic construct
PTNGTSRVR

SEQ ID NO: 55745 - protein, 9 aa, synthetic construct
PTNGTSRVK

SEQ ID NO: 55746 - protein, 9 aa, synthetic construct
PTNGTSKLR

SEQ ID NO: 55747 - protein, 9 aa, synthetic construct
PTNGTSKLK

SEQ ID NO: 55748 - protein, 9 aa, synthetic construct
PTNGTSKVR

SEQ ID NO: 55749 - protein, 9 aa, synthetic construct
PTNGTSKVH

SEQ ID NO: 55750 - protein, 9 aa, synthetic construct
PTNGTSKVK

SEQ ID NO: 55751 - protein, 9 aa, synthetic construct
PTNGTTRVR

SEQ ID NO: 55752 - protein, 9 aa, synthetic construct
PTNGTTRVK

SEQ ID NO: 55753 - protein, 9 aa, synthetic construct
PTNGTTKLR

SEQ ID NO: 55754 - protein, 9 aa, synthetic construct
PTNGSSKLR

SEQ ID NO: 55755 - protein, 9 aa, synthetic construct
PTNGSTRLK

SEQ ID NO: 55756 - protein, 9 aa, synthetic construct
PTNGSTRVK

SEQ ID NO: 55757 - protein, 9 aa, synthetic construct
PTNGSTKLR

SEQ ID NO: 55758 - protein, 9 aa, synthetic construct
PTNGSTKLK

SEQ ID NO: 55759 - protein, 9 aa, synthetic construct
PTNGSTKVR

SEQ ID NO: 55760 - protein, 9 aa, synthetic construct
PTNGVSRLK

SEQ ID NO: 55761 - protein, 9 aa, synthetic construct
PTNGVSRVK

SEQ ID NO: 55762 - protein, 9 aa, synthetic construct
PTNGVSKLR

SEQ ID NO: 55763 - protein, 9 aa, synthetic construct
PTNGVSKVR

SEQ ID NO: 55764 - protein, 9 aa, synthetic construct
PTNGGSRVR

SEQ ID NO: 55765 - protein, 9 aa, synthetic construct
PTNGGTRLK

SEQ ID NO: 55766 - protein, 9 aa, synthetic construct
PTNGGTRVR

SEQ ID NO: 55767 - protein, 9 aa, synthetic construct
PTNGGTKLR

SEQ ID NO: 55768 - protein, 9 aa, synthetic construct
PTQGASRLR

SEQ ID NO: 55769 - protein, 9 aa, synthetic construct
PTQGASRLH

SEQ ID NO: 55770 - protein, 9 aa, synthetic construct
PTQGASRLK

SEQ ID NO: 55771 - protein, 9 aa, synthetic construct
PTQGASRVR

SEQ ID NO: 55772 - protein, 9 aa, synthetic construct
PTQGASRVH

SEQ ID NO: 55773 - protein, 9 aa, synthetic construct
PTQGASKLK

SEQ ID NO: 55774 - protein, 9 aa, synthetic construct
PTQGASKVR

SEQ ID NO: 55775 - protein, 9 aa, synthetic construct
PTQGASKVK

SEQ ID NO: 55776 - protein, 9 aa, synthetic construct
PTQGATRLR

SEQ ID NO: 55777 - protein, 9 aa, synthetic construct
PTQGATRLK

SEQ ID NO: 55778 - protein, 9 aa, synthetic construct
PTQGATRVR

SEQ ID NO: 55779 - protein, 9 aa, synthetic construct
PTQGATRVK

SEQ ID NO: 55780 - protein, 9 aa, synthetic construct
PTQGATKLR

SEQ ID NO: 55781 - protein, 9 aa, synthetic construct
PTQGATKLK

SEQ ID NO: 55782 - protein, 9 aa, synthetic construct
PTQGATKVR

SEQ ID NO: 55783 - protein, 9 aa, synthetic construct
PTQGTSRLK

SEQ ID NO: 55784 - protein, 9 aa, synthetic construct
PTQGTSRVR

SEQ ID NO: 55785 - protein, 9 aa, synthetic construct
PTQGTSRVK

SEQ ID NO: 55786 - protein, 9 aa, synthetic construct
PTQGTSKLR

SEQ ID NO: 55787 - protein, 9 aa, synthetic construct
PTQGTSKLK

SEQ ID NO: 55788 - protein, 9 aa, synthetic construct
PTQGTTRVR

SEQ ID NO: 55789 - protein, 9 aa, synthetic construct
PTQGTTRVK

SEQ ID NO: 55790 - protein, 9 aa, synthetic construct
PTQGTTKLR

SEQ ID NO: 55791 - protein, 9 aa, synthetic construct
PTQGTTKLK

SEQ ID NO: 55792 - protein, 9 aa, synthetic construct
PTQGTTKVR

SEQ ID NO: 55793 - protein, 9 aa, synthetic construct
PTQGTTKVK

SEQ ID NO: 55794 - protein, 9 aa, synthetic construct
PTQGSSKLK

SEQ ID NO: 55795 - protein, 9 aa, synthetic construct
PTQGSSKVR

SEQ ID NO: 55796 - protein, 9 aa, synthetic construct
PTQGSSKVK

SEQ ID NO: 55797 - protein, 9 aa, synthetic construct
PTQGSTRLK

SEQ ID NO: 55798 - protein, 9 aa, synthetic construct
PTQGSTRVR

SEQ ID NO: 55799 - protein, 9 aa, synthetic construct
PTQGSTRVH

SEQ ID NO: 55800 - protein, 9 aa, synthetic construct
PTQGSTRVK

SEQ ID NO: 55801 - protein, 9 aa, synthetic construct
PTQGSTKLR

SEQ ID NO: 55802 - protein, 9 aa, synthetic construct
PTQGSTKLK

SEQ ID NO: 55803 - protein, 9 aa, synthetic construct
PTQGSTKVK

SEQ ID NO: 55804 - protein, 9 aa, synthetic construct
PTQGVSHLF

SEQ ID NO: 55805 - protein, 9 aa, synthetic construct
PTQGVSRLR

SEQ ID NO: 55806 - protein, 9 aa, synthetic construct
PTQGVSRVR

SEQ ID NO: 55807 - protein, 9 aa, synthetic construct
PTQGVSRVK

SEQ ID NO: 55808 - protein, 9 aa, synthetic construct
PTQGVSKLR

SEQ ID NO: 55809 - protein, 9 aa, synthetic construct
PTQGVSKVR

SEQ ID NO: 55810 - protein, 9 aa, synthetic construct
PTQGVSKVK

SEQ ID NO: 55811 - protein, 9 aa, synthetic construct
PTQGVTRLR

SEQ ID NO: 55812 - protein, 9 aa, synthetic construct
PTQGVTRLK

SEQ ID NO: 55813 - protein, 9 aa, synthetic construct
PTQGVTRVR

SEQ ID NO: 55814 - protein, 9 aa, synthetic construct
PTQGVTRVK

SEQ ID NO: 55815 - protein, 9 aa, synthetic construct
PTQGVTKLR

SEQ ID NO: 55816 - protein, 9 aa, synthetic construct
PTQGGSKLK

SEQ ID NO: 55817 - protein, 9 aa, synthetic construct
PTQGGSKVR

SEQ ID NO: 55818 - protein, 9 aa, synthetic construct
PTQGGTRLR

SEQ ID NO: 55819 - protein, 9 aa, synthetic construct
PTQGGTRVR

SEQ ID NO: 55820 - protein, 743 aa, synthetic construct
MAADGYLPDWLEDNLSEGIREWWDLKPGAPKPKANQQKQDDGRGLVLPGYKYLGPFNGLDKGEPVNAADAAALEHDKAYDQQLKAGDNPYLRYNHADAEFQERLQEDTSFGGNLGRAVFQAKKRVLEPLGLVEEGAKTAPGKKRPVEQSPQEPDSSSGIGKKGQQPARKRLNFGQTGDSESVPDPQPLGEPPAAPSGVGSNTMAAGGGAPMADNNEGADGVGNASGNWHCDSTWLGDRVITTSTRTWALPTYNNHLYKQISSQSGGSTNDNTYFGYSTPWGYFDFNRFHCHFSPRDWQRLINNNWGFRPKKLNFKLFNIQVKEVTTNDGTTTIANNLTSTVQVFTDSEYQLPYVLGSAHQGCLPPFPADVFMIPQYGYLTLNNGSQAVGRSSFYCLEYFPSQMLRTGNNFQFSYTFEDVPFHSSYAHSQSLDRLMNPLIDQYLYYLSRTQTTSGTAGNRTLQFSQAGPSSMANQAKNWLPGPCYRQQRVSKTTNQNNNSNFAWTGATKYHLNGRDSLVNPGPAMATHKDDEDKFFPMSGVLIFGKQGAGNSNVDLDNVMITNEEEIKTTNPVATESYGQVATNHQSPLNGAVHLYAQAQTGWVQNQGILPGMVWQDRDVYLQGPIWAKIPHTDGHFHPSPLMGGFGLKHPPPQILIKNTPVPANPPTTFSPAKFASFITQYSTGQVSVEIEWELQKENSKRWNPEIQYTSNYNKSTNVDFAVDTNGVYSEPRPIGTRYLTRNL

SEQ ID NO: 55821 - protein, 742 aa, synthetic construct
MAADGYLPDWLEDNLSEGIREWWDLKPGAPKPKANQQKQDDGRGLVLPGYKYLGPFNGLDKGEPVNAADAAALEHDKAYDQQLKAGDNPYLRYNHADAEFQERLQEDTSFGGNLGRAVFQAKKRVLEPLGLVEEGAKTAPGKKRPVEQSPQEPDSSSGIGKKGQQPARKRLNFGQTGDSESVPDPQPLGEPPAAPSGVGSNTMAAGGGAPMADNNEGADGVGNASGNWHCDSTWLGDRVITTSTRTWALPTYNNHLYKQISSQSGGSTNDNTYFGYSTPWGYFDFNRFHCHFSPRDWQRLINNNWGFRPKKLNFKLFNIQVKEVTTNDGTTTIANNLTSTVQVFTDSEYQLPYVLGSAHQGCLPPFPADVFMIPQYGYLTLNNGSQAVGRSSFYCLEYFPSQMLRTGNNFQFSYTFEDVPFHSSYAHSQSLDRLMNPLIDQYLYYLSKTINGSGQNQQTLKFSVAGPSSMANQAKNWLPGPCYRQQRVSKTTNQNNNSNFAWTGATKYHLNGRDSLVNPGPAMATHKDDEDKFFPMSGVLIFGKQGAGNSNVDLDNVMITNEEEIKTTNPVATESYGQVATNHQSPLNGAVHLYAQAQTGWVQNQGILPGMVWQDRDVYLQGPIWAKIPHTDGHFHPSPLMGGFGLKHPPPQILIKNTPVPANPPTTFSPAKFASFITQYSTGQVSVEIEWELQKENSKRWNPEIQYTSNYNKSTNVDFAVDTNGVYSEPRPIGTRYLTRNL

SEQ ID NO: 55822 - protein, 743 aa, synthetic construct; identical to SEQ ID NO: 55820

SEQ ID NO: 55823 - protein, 742 aa, synthetic construct
MAADGYLPDWLEDNLSEGIREWWDLKPGAPKPKANQQKQDDGRGLVLPGYKYLGPFNGLDKGEPVNAADAAALEHDKAYDQQLKAGDNPYLRYNHADAEFQERLQEDTSFGGNLGRAVFQAKKRVLEPLGLVEEGAKTAPGKKRPVEQSPQEPDSSSGIGKKGQQPARKRLNFGQTGDSESVPDPQPLGEPPAAPSGVGSNTMAAGGGAPMADNNEGADGVGNASGNWHCDSTWLGDRVITTSTRTWALPTYNNHLYKQISSQSGGSTNDNTYFGYSTPWGYFDFNRFHCHFSPRDWQRLINNNWGFRPKKLNFKLFNIQVKEVTTNDGTTTIANNLTSTVQVFTDSEYQLPYVLGSAHQGCLPPFPADVFMIPQYGYLTLNNGSQAVGRSSFYCLEYFPSQMLRTGNNFQFSYTFEDVPFHSSYAHSQSLDRLMNPLIDQYLYYLSKTINGSGQNQQTLKFSVAGPSSMANQAKNWLPGPCYRQQRVSTTVTQNNNSEFAWPGASSWALNGRDSLVNPGPAMATHKDDEDKFFPMSGVLIFGKQGAGNSNVDLDNVMITNEEEIKTTNPVATESYGQVATNHQSPLNGAVHLYAQAQTGWVQNQGILPGMVWQDRDVYLQGPIWAKIPHTDGHFHPSPLMGGFGLKHPPPQILIKNTPVPANPPTTFSPAKFASFITQYSTGQVSVEIEWELQKENSKRWNPEIQYTSNYNKSTNVDFAVDTNGVYSEPRPIGTRYLTRNL

SEQ ID NO: 55824 - protein, 743 aa, synthetic construct
MAADGYLPDWLEDNLSEGIREWWDLKPGAPKPKANQQKQDDGRGLVLPGYKYLGPFNGLDKGEPVNAADAAALEHDKAYDQQLKAGDNPYLRYNHADAEFQERLQEDTSFGGNLGRAVFQAKKRVLEPLGLVEEGAKTAPGKKRPVEQSPQEPDSSSGIGKKGQQPARKRLNFGQTGDSESVPDPQPLGEPPAAPSGVGSNTMAAGGGAPMADNNEGADGVGNASGNWHCDSTWLGDRVITTSTRTWALPTYNNHLYKQISSQSGGSTNDNTYFGYSTPWGYFDFNRFHCHFSPRDWQRLINNNWGFRPKKLNFKLFNIQVKEVTTNDGTTTIANNLTSTVQVFTDSEYQLPYVLGSAHQGCLPPFPADVFMIPQYGYLTLNNGSQAVGRSSFYCLEYFPSQMLRTGNNFQFSYTFEDVPFHSSYAHSQSLDRLMNPLIDQYLYYLSRTQTTSGTAGNRTLQFSQAGPSSMANQAKNWLPGPCYRQQRVSTTVTQNNNSEFAWPGASSWALNGRDSLVNPGPAMATHKDDEDKFFPMSGVLIFGKQGAGNSNVDLDNVMITNEEEIKTTNPVATESYGQVATNHQSPLNGAVHLYAQAQTGWVQNQGILPGMVWQDRDVYLQGPIWAKIPHTDGHFHPSPLMGGFGLKHPPPQILIKNTPVPANPPTTFSPAKFASFITQYSTGQVSVEIEWELQKENSKRWNPEIQYTSNYNKSTNVDFAVDTNGVYSEPRPIGTRYLTRNL

SEQ ID NO: 55825 - protein, 743 aa, synthetic construct
MAADGYLPDWLEDNLSEGIREWWALKPGAPQPKANQQHQDNARGLVLPGYKYLGPGNGLDKGEPVNAADAAALEHDKAYDQQLKAGDNPYLKYNHADAEFQERLKEDTSFGGNLGRAVFQAKKRLLEPLGLVEEAAKTAPGKKRPVEQSPQEPDSSAGIGKSGAQPAKKRLNFGQTGDTESVPDPQPIGEPPAAPSGVGSLTMASGGGAPVADNNEGADGVGSSSGNWHCDSQWLGDRVITTSTRTWALPTYNNHLYKQISNSTSGGSSNDNAYFGYSTPWGYFDFNRFHCHFSPRDWQRLINNNWGFRPKRLNFKLFNIQVKEVTDNNGVKTIANNLTSTVQVFTDSDYQLPYVLGSAHEGCLPPFPADVFMIPQYGYLTLNDGSQAVGRSSFYCLEYFPSQMLRTGNNFQFSYEFENVPFHSSYAHSQSLDRLMNPLIDQYLYYLSKTINGSGQNQQTLKFSVAGPSNMAVQGRNYIPGPSYRQQRVSTTVTQNNNSEFAWPGASSWALNGRNSLMNPGPAMASHKEGEDRFFPLSGSLIFGKQGTGRDNVDADKVMITNEEEIKTTNPVATESYGQVATNHQSPLQGAVHLYAQAQTGWVQNQGILPGMVWQDRDVYLQGPIWAKIPHTDGNFHPSPLMGGFGMKHPPPQILIKNTPVPADPPTAFNKDKLNSFITQYSTGQVSVEIEWELQKENSKRWNPEIQYTSNYYKSNNVEFAVNTEGVYSEPRPIGTRYLTRNL

SEQ ID NO: 55826 - protein, 743 aa, synthetic construct
MAADGYLPDWLEDNLSEGIREWWALKPGAPQPKANQQHQDNARGLVLPGYKYLGPGNGLDKGEPVNAADAAALEHDKAYDQQLKAGDNPYLKYNHADAEFQERLKEDTSFGGNLGRAVFQAKKRLLEPLGLVEEAAKTAPGKKRPVEQSPQEPDSSAGIGKSGAQPAKKRLNFGQTGDTESVPDPQPIGEPPAAPSGVGSLTMASGGGAPVADNNEGADGVGSSSGNWHCDSQWLGDRVITTSTRTWALPTYNNHLYKQISNSTSGGSSNDNAYFGYSTPWGYFDFNRFHCHFSPRDWQRLINNNWGFRPKRLNFKLFNIQVKEVTDNNGVKTIANNLTSTVQVFTDSDYQLPYVLGSAHEGCLPPFPADVFMIPQYGYLTLNDGSQAVGRSSFYCLEYFPSQMLRTGNNFQFSYEFENVPFHSSYAHSQSLDRLMNPLIDQYLYYLSKTINGSGQNQQTLKFSVAGPSNMAVQGRNYIPGPSYRQQRVSTTVTQNNNSEFAWPGASSWALNGRNSLMNPGPAMASHKEGEDRFFPLSGSLIFGKQGTGRDNVDADKVMITNEEEIKTTNPVATESYGQVATNHQSPLQGAVRLYAQAQTGWVQNQGILPGMVWQDRDVYLQGPIWAKIPHTDGNFHPSPLMGGFGMKHPPPQILIKNTPVPADPPTAFNKDKLNSFITQYSTGQVSVEIEWELQKENSKRWNPEIQYTSNYYKSNNVEFAVNTEGVYSEPRPIGTRYLTRNL

SEQ ID NO: 55827 - protein, 743 aa, synthetic construct
MAADGYLPDWLEDNLSEGIREWWALKPGAPQPKANQQHQDNARGLVLPGYKYLGPGNGLDKGEPVNAADAAALEHDKAYDQQLKAGDNPYLKYNHADAEFQERLKEDTSFGGNLGRAVFQAKKRLLEPLGLVEEAAKTAPGKKRPVEQSPQEPDSSAGIGKSGAQPAKKRLNFGQTGDTESVPDPQPIGEPPAAPSGVGSLTMASGGGAPVADNNEGADGVGSSSGNWHCDSQWLGDRVITTSTRTWALPTYNNHLYKQISNSTSGGSSNDNAYFGYSTPWGYFDFNRFHCHFSPRDWQRLINNNWGFRPKRLNFKLFNIQVKEVTDNNGVKTIANNLTSTVQVFTDSDYQLPYVLGSAHEGCLPPFPADVFMIPQYGYLTLNDGSQAVGRSSFYCLEYFPSQMLRTGNNFQFSYEFENVPFHSSYAHSQSLDRLMNPLIDQYLYYLSKTINGSGQNQQTLKFSVAGPSNMAVQGRNYIPGPSYRQQRVSTTVTQNNNSEFAWPGASSWALNGRNSLMNPGPAMASHKEGEDRFFPLSGSLIFGKQGTGRDNVDADKVMITNEEEIKTTNPVATESYGQVATNHQSPLQGAVKLYAQAQTGWVQNQGILPGMVWQDRDVYLQGPIWAKIPHTDGNFHPSPLMGGFGMKHPPPQILIKNTPVPADPPTAFNKDKLNSFITQYSTGQVSVEIEWELQKENSKRWNPEIQYTSNYYKSNNVEFAVNTEGVYSEPRPIGTRYLTRNL

SEQ ID NO: 55828 - protein, 743 aa, synthetic construct
MAADGYLPDWLEDNLSEGIREWWALKPGAPQPKANQQHQDNARGLVLPGYKYLGPGNGLDKGEPVNAADAAALEHDKAYDQQLKAGDNPYLKYNHADAEFQERLKEDTSFGGNLGRAVFQAKKRLLEPLGLVEEAAKTAPGKKRPVEQSPQEPDSSAGIGKSGAQPAKKRLNFGQTGDTESVPDPQPIGEPPAAPSGVGSLTMASGGGAPVADNNEGADGVGSSSGNWHCDSQWLGDRVITTSTRTWALPTYNNHLYKQISNSTSGGSSNDNAYFGYSTPWGYFDFNRFHCHFSPRDWQRLINNNWGFRPKRLNFKLFNIQVKEVTDNNGVKTIANNLTSTVQVFTDSDYQLPYVLGSAHEGCLPPFPADVFMIPQYGYLTLNDGSQAVGRSSFYCLEYFPSQMLRTGNNFQFSYEFENVPFHSSYAHSQSLDRLMNPLIDQYLYYLSKTINGSGQNQQTLKFSVAGPSNMAVQGRNYIPGPSYRQQRVSTTVTQNNNSEFAWPGASSWALNGRNSLMNPGPAMASHKEGEDRFFPLSGSLIFGKQGTGRDNVDADKVMITNEEEIKTTNPVATESYGQVATNHQSPINGAVHLYAQAQTGWVQNQGILPGMVWQDRDVYLQGPIWAKIPHTDGNFHPSPLMGGFGMKHPPPQILIKNTPVPADPPTAFNKDKLNSFITQYSTGQVSVEIEWELQKENSKRWNPEIQYTSNYYKSNNVEFAVNTEGVYSEPRPIGTRYLTRNL

SEQ ID NO: 55829 - protein, 743 aa, synthetic construct
MAADGYLPDWLEDNLSEGIREWWALKPGAPQPKANQQHQDNARGLVLPGYKYLGPGNGLDKGEPVNAADAAALEHDKAYDQQLKAGDNPYLKYNHADAEFQERLKEDTSFGGNLGRAVFQAKKRLLEPLGLVEEAAKTAPGKKRPVEQSPQEPDSSAGIGKSGAQPAKKRLNFGQTGDTESVPDPQPIGEPPAAPSGVGSLTMASGGGAPVADNNEGADGVGSSSGNWHCDSQWLGDRVITTSTRTWALPTYNNHLYKQISNSTSGGSSNDNAYFGYSTPWGYFDFNRFHCHFSPRDWQRLINNNWGFRPKRLNFKLFNIQVKEVTDNNGVKTIANNLTSTVQVFTDSDYQLPYVLGSAHEGCLPPFPADVFMIPQYGYLTLNDGSQAVGRSSFYCLEYFPSQMLRTGNNFQFSYEFENVPFHSSYAHSQSLDRLMNPLIDQYLYYLSKTINGSGQNQQTLKFSVAGPSNMAVQGRNYIPGPSYRQQRVSTTVTQNNNSEFAWPGASSWALNGRNSLMNPGPAMASHKEGEDRFFPLSGSLIFGKQGTGRDNVDADKVMITNEEEIKTTNPVATESYGQVATNHQSPVNGAVHLYAQAQTGWVQNQGILPGMVWQDRDVYLQGPIWAKIPHTDGNFHPSPLMGGFGMKHPPPQILIKNTPVPADPPTAFNKDKLNSFITQYSTGQVSVEIEWELQKENSKRWNPEIQYTSNYYKSNNVEFAVNTEGVYSEPRPIGTRYLTRNL

SEQ ID NO: 55830 - protein, 743 aa, synthetic construct
MAADGYLPDWLEDNLSEGIREWWALKPGAPQPKANQQHQDNARGLVLPGYKYLGPGNGLDKGEPVNAADAAALEHDKAYDQQLKAGDNPYLKYNHADAEFQERLKEDTSFGGNLGRAVFQAKKRLLEPLGLVEEAAKTAPGKKRPVEQSPQEPDSSAGIGKSGAQPAKKRLNFGQTGDTESVPDPQPIGEPPAAPSGVGSLTMASGGGAPVADNNEGADGVGSSSGNWHCDSQWLGDRVITTSTRTWALPTYNNHLYKQISNSTSGGSSNDNAYFGYSTPWGYFDFNRFHCHFSPRDWQRLINNNWGFRPKRLNFKLFNIQVKEVTDNNGVKTIANNLTSTVQVFTDSDYQLPYVLGSAHEGCLPPFPADVFMIPQYGYLTLNDGSQAVGRSSFYCLEYFPSQMLRTGNNFQFSYEFENVPFHSSYAHSQSLDRLMNPLIDQYLYYLSKTINGSGQNQQTLKFSVAGPSNMAVQGRNYIPGPSYRQQRVSTTVTQNNNSEFAWPGASSWALNGRNSLMNPGPAMASHKEGEDRFFPLSGSLIFGKQGTGRDNVDADKVMITNEEEIKTTNPVATESYGQVATNHQSPANGAVHLYAQAQTGWVQNQGILPGMVWQDRDVYLQGPIWAKIPHTDGNFHPSPLMGGFGMKHPPPQILIKNTPVPADPPTAFNKDKLNSFITQYSTGQVSVEIEWELQKENSKRWNPEIQYTSNYYKSNNVEFAVNTEGVYSEPRPIGTRYLTRNL

SEQ ID NO: 55831 - protein, 743 aa, synthetic construct
MAADGYLPDWLEDNLSEGIREWWALKPGAPQPKANQQHQDNARGLVLPGYKYLGPGNGLDKGEPVNAADAAALEHDKAYDQQLKAGDNPYLKYNHADAEFQERLKEDTSFGGNLGRAVFQAKKRLLEPLGLVEEAAKTAPGKKRPVEQSPQEPDSSAGIGKSGAQPAKKRLNFGQTGDTESVPDPQPIGEPPAAPSGVGSLTMASGGGAPVADNNEGADGVGSSSGNWHCDSQWLGDRVITTSTRTWALPTYNNHLYKQISNSTSGGSSNDNAYFGYSTPWGYFDFNRFHCHFSPRDWQRLINNNWGFRPKRLNFKLFNIQVKEVTDNNGVKTIANNLTSTVQVFTDSDYQLPYVLGSAHEGCLPPFPADVFMIPQYGYLTLNDGSQAVGRSSFYCLEYFPSQMLRTGNNFQFSYEFENVPFHSSYAHSQSLDRLMNPLIDQYLYYLSKTINGSGQNQQTLKFSVAGPSNMAVQGRNYIPGPSYRQQRVSTTVTQNNNSEFAWPGASSWALNGRNSLMNPGPAMASHKEGEDRFFPLSGSLIFGKQGTGRDNVDADKVMITNEEEIKTTNPVATESYGQVATNHQSPTNGTVRLYAQAQTGWVQNQGILPGMVWQDRDVYLQGPIWAKIPHTDGNFHPSPLMGGFGMKHPPPQILIKNTPVPADPPTAFNKDKLNSFITQYSTGQVSVEIEWELQKENSKRWNPEIQYTSNYYKSNNVEFAVNTEGVYSEPRPIGTRYLTRNL

SEQ ID NO: 55832 - protein, 743 aa, synthetic construct
MAADGYLPDWLEDNLSEGIREWWALKPGAPQPKANQQHQDNARGLVLPGYKYLGPGNGLDKGEPVNAADAAALEHDKAYDQQLKAGDNPYLKYNHADAEFQERLKEDTSFGGNLGRAVFQAKKRLLEPLGLVEEAAKTAPGKKRPVEQSPQEPDSSAGIGKSGAQPAKKRLNFGQTGDTESVPDPQPIGEPPAAPSGVGSLTMASGGGAPVADNNEGADGVGSSSGNWHCDSQWLGDRVITTSTRTWALPTYNNHLYKQISNSTSGGSSNDNAYFGYSTPWGYFDFNRFHCHFSPRDWQRLINNNWGFRPKRLNFKLFNIQVKEVTDNNGVKTIANNLTSTVQVFTDSDYQLPYVLGSAHEGCLPPFPADVFMIPQYGYLTLNDGSQAVGRSSFYCLEYFPSQMLRTGNNFQFSYEFENVPFHSSYAHSQSLDRLMNPLIDQYLYYLSKTINGSGQNQQTLKFSVAGPSNMAVQGRNYIPGPSYRQQRVSTTVTQNNNSEFAWPGASSWALNGRNSLMNPGPAMASHKEGEDRFFPLSGSLIFGKQGTGRDNVDADKVMITNEEEIKTTNPVATESYGQVATNHQSPTNGTVHLYAQAQTGWVQNQGILPGMVWQDRDVYLQGPIWAKIPHTDGNFHPSPLMGGFGMKHPPPQILIKNTPVPADPPTAFNKDKLNSFITQYSTGQVSVEIEWELQKENSKRWNPEIQYTSNYYKSNNVEFAVNTEGVYSEPRPIGTRYLTRNL

SEQ ID NO: 55833 - protein, 743 aa, synthetic construct
MAADGYLPDWLEDNLSEGIREWWALKPGAPQPKANQQHQDNARGLVLPGYKYLGPGNGLDKGEPVNAADAAALEHDKAYDQQLKAGDNPYLKYNHADAEFQERLKEDTSFGGNLGRAVFQAKKRLLEPLGLVEEAAKTAPGKKRPVEQSPQEPDSSAGIGKSGAQPAKKRLNFGQTGDTESVPDPQPIGEPPAAPSGVGSLTMASGGGAPVADNNEGADGVGSSSGNWHCDSQWLGDRVITTSTRTWALPTYNNHLYKQISNSTSGGSSNDNAYFGYSTPWGYFDFNRFHCHFSPRDWQRLINNNWGFRPKRLNFKLFNIQVKEVTDNNGVKTIANNLTSTVQVFTDSDYQLPYVLGSAHEGCLPPFPADVFMIPQYGYLTLNDGSQAVGRSSFYCLEYFPSQMLRTGNNFQFSYEFENVPFHSSYAHSQSLDRLMNPLIDQYLYYLSKTINGSGQNQQTLKFSVAGPSNMAVQGRNYIPGPSYRQQRVSTTVTQNNNSEFAWPGASSWALNGRNSLMNPGPAMASHKEGEDRFFPLSGSLIFGKQGTGRDNVDADKVMITNEEEIKTTNPVATESYGQVATNHQSPTNGTVKLYAQAQTGWVQNQGILPGMVWQDRDVYLQGPIWAKIPHTDGNFHPSPLMGGFGMKHPPPQILIKNTPVPADPPTAFNKDKLNSFITQYSTGQVSVEIEWELQKENSKRWNPEIQYTSNYYKSNNVEFAVNTEGVYSEPRPIGTRYLTRNL

SEQ ID NO: 55834 - protein, 743 aa, synthetic construct
MAADGYLPDWLEDNLSEGIREWWALKPGAPQPKANQQHQDNARGLVLPGYKYLGPGNGLDKGEPVNAADAAALEHDKAYDQQLKAGDNPYLKYNHADAEFQERLKEDTSFGGNLGRAVFQAKKRLLEPLGLVEEAAKTAPGKKRPVEQSPQEPDSSAGIGKSGAQPAKKRLNFGQTGDTESVPDPQPIGEPPAAPSGVGSLTMASGGGAPVADNNEGADGVGSSSGNWHCDSQWLGDRVITTSTRTWALPTYNNHLYKQISNSTSGGSSNDNAYFGYSTPWGYFDFNRFHCHFSPRDWQRLINNNWGFRPKRLNFKLFNIQVKEVTDNNGVKTIANNLTSTVQVFTDSDYQLPYVLGSAHEGCLPPFPADVFMIPQYGYLTLNDGSQAVGRSSFYCLEYFPSQMLRTGNNFQFSYEFENVPFHSSYAHSQSLDRLMNPLIDQYLYYLSKTINGSGQNQQTLKFSVAGPSNMAVQGRNYIPGPSYRQQRVSTTVTQNNNSEFAWPGASSWALNGRNSLMNPGPAMASHKEGEDRFFPLSGSLIFGKQGTGRDNVDADKVMITNEEEIKTTNPVATESYGQVATNHQSPSNGTLRLYAQAQTGWVQNQGILPGMVWQDRDVYLQGPIWAKIPHTDGNFHPSPLMGGFGMKHPPPQILIKNTPVPADPPTAFNKDKLNSFITQYSTGQVSVEIEWELQKENSKRWNPEIQYTSNYYKSNNVEFAVNTEGVYSEPRPIGTRYLTRNL

SEQ ID NO: 55835 - protein, 743 aa, synthetic construct
MAADGYLPDWLEDNLSEGIREWWALKPGAPQPKANQQHQDNARGLVLPGYKYLGPGNGLDKGEPVNAADAAALEHDKAYDQQLKAGDNPYLKYNHADAEFQERLKEDTSFGGNLGRAVFQAKKRLLEPLGLVEEAAKTAPGKKRPVEQSPQEPDSSAGIGKSGAQPAKKRLNFGQTGDTESVPDPQPIGEPPAAPSGVGSLTMASGGGAPVADNNEGADGVGSSSGNWHCDSQWLGDRVITTSTRTWALPTYNNHLYKQISNSTSGGSSNDNAYFGYSTPWGYFDFNRFHCHFSPRDWQRLINNNWGFRPKRLNFKLFNIQVKEVTDNNGVKTIANNLTSTVQVFTDSDYQLPYVLGSAHEGCLPPFPADVFMIPQYGYLTLNDGSQAVGRSSFYCLEYFPSQMLRTGNNFQFSYEFENVPFHSSYAHSQSLDRLMNPLIDQYLYYLSKTINGSGQNQQTLKFSVAGPSNMAVQGRNYIPGPSYRQQRVSTTVTQNNNSEFAWPGASSWALNGRNSLMNPGPAMASHKEGEDRFFPLSGSLIFGKQGTGRDNVDADKVMITNEEEIKTTNPVATESYGQVATNHQSPSNGTLHLYAQAQTGWVQNQGILPGMVWQDRDVYLQGPIWAKIPHTDGNFHPSPLMGGFGMKHPPPQILIKNTPVPADPPTAFNKDKLNSFITQYSTGQVSVEIEWELQKENSKRWNPEIQYTSNYYKSNNVEFAVNTEGVYSEPRPIGTRYLTRNL

SEQ ID NO: 55836 - protein, 743 aa, synthetic construct
MAADGYLPDWLEDNLSEGIREWWALKPGAPQPKANQQHQDNARGLVLPGYKYLGPGNGLDKGEPVNAADAAALEHDKAYDQQLKAGDNPYLKYNHADAEFQERLKEDTSFGGNLGRAVFQAKKRLLEPLGLVEEAAKTAPGKKRPVEQSPQEPDSSAGIGKSGAQPAKKRLNFGQTGDTESVPDPQPIGEPPAAPSGVGSLTMASGGGAPVADNNEGADGVGSSSGNWHCDSQWLGDRVITTSTRTWALPTYNNHLYKQISNSTSGGSSNDNAYFGYSTPWGYFDFNRFHCHFSPRDWQRLINNNWGFRPKRLNFKLFNIQVKEVTDNNGVKTIANNLTSTVQVFTDSDYQLPYVLGSAHEGCLPPFPADVFMIPQYGYLTLNDGSQAVGRSSFYCLEYFPSQMLRTGNNFQFSYEFENVPFHSSYAHSQSLDRLMNPLIDQYLYYLSKTINGSGQNQQTLKFSVAGPSNMAVQGRNYIPGPSYRQQRVSTTVTQNNNSEFAWPGASSWALNGRNSLMNPGPAMASHKEGEDRFFPLSGSLIFGKQGTGRDNVDADKVMITNEEEIKTTNPVATESYGQVATNHQSPSNGTLKLYAQAQTGWVQNQGILPGMVWQDRDVYLQGPIWAKIPHTDGNFHPSPLMGGFGMKHPPPQILIKNTPVPADPPTAFNKDKLNSFITQYSTGQVSVEIEWELQKENSKRWNPEIQYTSNYYKSNNVEFAVNTEGVYSEPRPIGTRYLTRNL

SEQ ID NO: 55837 - protein, 743 aa, synthetic construct
MAADGYLPDWLEDNLSEGIREWWALKPGAPQPKANQQHQDNARGLVLPGYKYLGPGNGLDKGEPVNAADAAALEHDKAYDQQLKAGDNPYLKYNHADAEFQERLKEDTSFGGNLGRAVFQAKKRLLEPLGLVEEAAKTAPGKKRPVEQSPQEPDSSAGIGKSGAQPAKKRLNFGQTGDTESVPDPQPIGEPPAAPSGVGSLTMASGGGAPVADNNEGADGVGSSSGNWHCDSQWLGDRVITTSTRTWALPTYNNHLYKQISNSTSGGSSNDNAYFGYSTPWGYFDFNRFHCHFSPRDWQRLINNNWGFRPKRLNFKLFNIQVKEVTDNNGVKTIANNLTSTVQVFTDSDYQLPYVLGSAHEGCLPPFPADVFMIPQYGYLTLNDGSQAVGRSSFYCLEYFPSQMLRTGNNFQFSYEFENVPFHSSYAHSQSLDRLMNPLIDQYLYYLSKTINGSGQNQQTLKFSVAGPSNMAVQGRNYIPGPSYRQQRVSTTVTQNNNSEFAWPGASSWALNGRNSLMNPGPAMASHKEGEDRFFPLSGSLIFGKQGTGRDNVDADKVMITNEEEIKTTNPVATESYGQVATNHQSPTNGTLRLYAQAQTGWVQNQGILPGMVWQDRDVYLQGPIWAKIPHTDGNFHPSPLMGGFGMKHPPPQILIKNTPVPADPPTAFNKDKLNSFITQYSTGQVSVEIEWELQKENSKRWNPEIQYTSNYYKSNNVEFAVNTEGVYSEPRPIGTRYLTRNL

SEQ ID NO: 55838 - protein, 743 aa, synthetic construct
MAADGYLPDWLEDNLSEGIREWWALKPGAPQPKANQQHQDNARGLVLPGYKYLGPGNGLDKGEPVNAADAAALEHDKAYDQQLKAGDNPYLKYNHADAEFQERLKEDTSFGGNLGRAVFQAKKRLLEPLGLVEEAAKTAPGKKRPVEQSPQEPDSSAGIGKSGAQPAKKRLNFGQTGDTESVPDPQPIGEPPAAPSGVGSLTMASGGGAPVADNNEGADGVGSSSGNWHCDSQWLGDRVITTSTRTWALPTYNNHLYKQISNSTSGGSSNDNAYFGYSTPWGYFDFNRFHCHFSPRDWQRLINNNWGFRPKRLNFKLFNIQVKEVTDNNGVKTIANNLTSTVQVFTDSDYQLPYVLGSAHEGCLPPFPADVFMIPQYGYLTLNDGSQAVGRSSFYCLEYFPSQMLRTGNNFQFSYEFENVPFHSSYAHSQSLDRLMNPLIDQYLYYLSKTINGSGQNQQTLKFSVAGPSNMAVQGRNYIPGPSYRQQRVSTTVTQNNNSEFAWPGASSWALNGRNSLMNPGPAMASHKEGEDRFFPLSGSLIFGKQGTGRDNVDADKVMITNEEEIKTTNPVATESYGQVATNHQSPTNGTLHLYAQAQTGWVQNQGILPGMVWQDRDVYLQGPIWAKIPHTDGNFHPSPLMGGFGMKHPPPQILIKNTPVPADPPTAFNKDKLNSFITQYSTGQVSVEIEWELQKENSKRWNPEIQYTSNYYKSNNVEFAVNTEGVYSEPRPIGTRYLTRNL

SEQ ID NO: 55839 - protein, 743 aa, synthetic construct
MAADGYLPDWLEDNLSEGIREWWALKPGAPQPKANQQHQDNARGLVLPGYKYLGPGNGLDKGEPVNAADAAALEHDKAYDQQLKAGDNPYLKYNHADAEFQERLKEDTSFGGNLGRAVFQAKKRLLEPLGLVEEAAKTAPGKKRPVEQSPQEPDSSAGIGKSGAQPAKKRLNFGQTGDTESVPDPQPIGEPPAAPSGVGSLTMASGGGAPVADNNEGADGVGSSSGNWHCDSQWLGDRVITTSTRTWALPTYNNHLYKQISNSTSGGSSNDNAYFGYSTPWGYFDFNRFHCHFSPRDWQRLINNNWGFRPKRLNFKLFNIQVKEVTDNNGVKTIANNLTSTVQVFTDSDYQLPYVLGSAHEGCLPPFPADVFMIPQYGYLTLNDGSQAVGRSSFYCLEYFPSQMLRTGNNFQFSYEFENVPFHSSYAHSQSLDRLMNPLIDQYLYYLSKTINGSGQNQQTLKFSVAGPSNMAVQGRNYIPGPSYRQQRVSTTVTQNNNSEFAWPGASSWALNGRNSLMNPGPAMASHKEGEDRFFPLSGSLIFGKQGTGRDNVDADKVMITNEEEIKTTNPVATESYGQVATNHQSPTNGTLKLYAQAQTGWVQNQGILPGMVWQDRDVYLQGPIWAKIPHTDGNFHPSPLMGGFGMKHPPPQILIKNTPVPADPPTAFNKDKLNSFITQYSTGQVSVEIEWELQKENSKRWNPEIQYTSNYYKSNNVEFAVNTEGVYSEPRPIGTRYLTRNL

SEQ ID NO: 55840 - protein, 743 aa, synthetic construct
MAADGYLPDWLEDNLSEGIREWWALKPGAPQPKANQQHQDNARGLVLPGYKYLGPGNGLDKGEPVNAADAAALEHDKAYDQQLKAGDNPYLKYNHADAEFQERLKEDTSFGGNLGRAVFQAKKRLLEPLGLVEEAAKTAPGKKRPVEQSPQEPDSSAGIGKSGAQPAKKRLNFGQTGDTESVPDPQPIGEPPAAPSGVGSLTMASGGGAPVADNNEGADGVGSSSGNWHCDSQWLGDRVITTSTRTWALPTYNNHLYKQISNSTSGGSSNDNAYFGYSTPWGYFDFNRFHCHFSPRDWQRLINNNWGFRPKRLNFKLFNIQVKEVTDNNGVKTIANNLTSTVQVFTDSDYQLPYVLGSAHEGCLPPFPADVFMIPQYGYLTLNDGSQAVGRSSFYCLEYFPSQMLRTGNNFQFSYEFENVPFHSSYAHSQSLDRLMNPLIDQYLYYLSKTINGSGQNQQTLKFSVAGPSNMAVQGRNYIPGPSYRQQRVSTTVTQNNNSEFAWPGASSWALNGRNSLMNPGPAMASHKEGEDRFFPLSGSLIFGKQGTGRDNVDADKVMITNEEEIKTTNPVATESYGQVATNHQSPTQGAVTVRAQAQTGWVQNQGILPGMVWQDRDVYLQGPIWAKIPHTDGNFHPSPLMGGFGMKHPPPQILIKNTPVPADPPTAFNKDKLNSFITQYSTGQVSVEIEWELQKENSKRWNPEIQYTSNYYKSNNVEFAVNTEGVYSEPRPIGTRYLTRNL

SEQ ID NO: 55841 - protein, 743 aa, synthetic construct
MAADGYLPDWLEDNLSEGIREWWALKPGAPQPKANQQHQDNARGLVLPGYKYLGPGNGLDKGEPVNAADAAALEHDKAYDQQLKAGDNPYLKYNHADAEFQERLKEDTSFGGNLGRAVFQAKKRLLEPLGLVEEAAKTAPGKKRPVEQSPQEPDSSAGIGKSGAQPAKKRLNFGQTGDTESVPDPQPIGEPPAAPSGVGSLTMASGGGAPVADNNEGADGVGSSSGNWHCDSQWLGDRVITTSTRTWALPTYNNHLYKQISNSTSGGSSNDNAYFGYSTPWGYFDFNRFHCHFSPRDWQRLINNNWGFRPKRLNFKLFNIQVKEVTDNNGVKTIANNLTSTVQVFTDSDYQLPYVLGSAHEGCLPPFPADVFMIPQYGYLTLNDGSQAVGRSSFYCLEYFPSQMLRTGNNFQFSYEFENVPFHSSYAHSQSLDRLMNPLIDQYLYYLSKTINGSGQNQQTLKFSVAGPSNMAVQGRNYIPGPSYRQQRVSTTVTQNNNSEFAWPGASSWALNGRNSLMNPGPAMASHKEGEDRFFPLSGSLIFGKQGTGRDNVDADKVMITNEEEIKTTNPVATESYGQVATNHQSPLQGAVTVRAQAQTGWVQNQGILPGMVWQDRDVYLQGPIWAKIPHTDGNFHPSPLMGGFGMKHPPPQILIKNTPVPADPPTAFNKDKLNSFITQYSTGQVSVEIEWELQKENSKRWNPEIQYTSNYYKSNNVEFAVNTEGVYSEPRPIGTRYLTRNL

SEQ ID NO: 55842 - protein, 743 aa, synthetic construct
MAADGYLPDWLEDNLSEGIREWWALKPGAPQPKANQQHQDNARGLVLPGYKYLGPGNGLDKGEPVNAADAAALEHDKAYDQQLKAGDNPYLKYNHADAEFQERLKEDTSFGGNLGRAVFQAKKRLLEPLGLVEEAAKTAPGKKRPVEQSPQEPDSSAGIGKSGAQPAKKRLNFGQTGDTESVPDPQPIGEPPAAPSGVGSLTMASGGGAPVADNNEGADGVGSSSGNWHCDSQWLGDRVITTSTRTWALPTYNNHLYKQISNSTSGGSSNDNAYFGYSTPWGYFDFNRFHCHFSPRDWQRLINNNWGFRPKRLNFKLFNIQVKEVTDNNGVKTIANNLTSTVQVFTDSDYQLPYVLGSAHEGCLPPFPADVFMIPQYGYLTLNDGSQAVGRSSFYCLEYFPSQMLRTGNNFQFSYEFENVPFHSSYAHSQSLDRLMNPLIDQYLYYLSKTINGSGQNQQTLKFSVAGPSNMAVQGRNYIPGPSYRQQRVSTTVTQNNNSEFAWPGASSWALNGRNSLMNPGPAMASHKEGEDRFFPLSGSLIFGKQGTGRDNVDADKVMITNEEEIKTTNPVATESYGQVATNHQSPLQGAVHVRAQAQTGWVQNQGILPGMVWQDRDVYLQGPIWAKIPHTDGNFHPSPLMGGFGMKHPPPQILIKNTPVPADPPTAFNKDKLNSFITQYSTGQVSVEIEWELQKENSKRWNPEIQYTSNYYKSNNVEFAVNTEGVYSEPRPIGTRYLTRNL

SEQ ID NO: 55843 - protein, 743 aa, synthetic construct
MAADGYLPDWLEDNLSEGIREWWALKPGAPQPKANQQHQDNARGLVLPGYKYLGPGNGLDKGEPVNAADAAALEHDKAYDQQLKAGDNPYLKYNHADAEFQERLKEDTSFGGNLGRAVFQAKKRLLEPLGLVEEAAKTAPGKKRPVEQSPQEPDSSAGIGKSGAQPAKKRLNFGQTGDTESVPDPQPIGEPPAAPSGVGSLTMASGGGAPVADNNEGADGVGSSSGNWHCDSQWLGDRVITTSTRTWALPTYNNHLYKQISNSTSGGSSNDNAYFGYSTPWGYFDFNRFHCHFSPRDWQRLINNNWGFRPKRLNFKLFNIQVKEVTDNNGVKTIANNLTSTVQVFTDSDYQLPYVLGSAHEGCLPPFPADVFMIPQYGYLTLNDGSQAVGRSSFYCLEYFPSQMLRTGNNFQFSYEFENVPFHSSYAHSQSLDRLMNPLIDQYLYYLSKTINGSGQNQQTLKFSVAGPSNMAVQGRNYIPGPSYRQQRVSTTVTQNNNSEFAWPGASSWALNGRNSLMNPGPAMASHKEGEDRFFPLSGSLIFGKQGTGRDNVDADKVMITNEEEIKTTNPVATESYGQVATNHQSPLQGAVHVYAQAQTGWVQNQGILPGMVWQDRDVYLQGPIWAKIPHTDGNFHPSPLMGGFGMKHPPPQILIKNTPVPADPPTAFNKDKLNSFITQYSTGQVSVEIEWELQKENSKRWNPEIQYTSNYYKSNNVEFAVNTEGVYSEPRPIGTRYLTRNL

SEQ ID NO: 55844 - protein, 743 aa, synthetic construct
MAADGYLPDWLEDNLSEGIREWWALKPGAPQPKANQQHQDNARGLVLPGYKYLGPGNGLDKGEPVNAADAAALEHDKAYDQQLKAGDNPYLKYNHADAEFQERLKEDTSFGGNLGRAVFQAKKRLLEPLGLVEEAAKTAPGKKRPVEQSPQEPDSSAGIGKSGAQPAKKRLNFGQTGDTESVPDPQPIGEPPAAPSGVGSLTMASGGGAPVADNNEGADGVGSSSGNWHCDSQWLGDRVITTSTRTWALPTYNNHLYKQISNSTSGGSSNDNAYFGYSTPWGYFDFNRFHCHFSPRDWQRLINNNWGFRPKRLNFKLFNIQVKEVTDNNGVKTIANNLTSTVQVFTDSDYQLPYVLGSAHEGCLPPFPADVFMIPQYGYLTLNDGSQAVGRSSFYCLEYFPSQMLRTGNNFQFSYEFENVPFHSSYAHSQSLDRLMNPLIDQYLYYLSKTINGSGQNQQTLKFSVAGPSNMAVQGRNYIPGPSYRQQRVSTTVTQNNNSEFAWPGASSWALNGRNSLMNPGPAMASHKEGEDRFFPLSGSLIFGKQGTGRDNVDADKVMITNEEEIKTTNPVATESYGQVATNHQSPSQGAVTLRAQAQTGWVQNQGILPGMVWQDRDVYLQGPIWAKIPHTDGNFHPSPLMGGFGMKHPPPQILIKNTPVPADPPTAFNKDKLNSFITQYSTGQVSVEIEWELQKENSKRWNPEIQYTSNYYKSNNVEFAVNTEGVYSEPRPIGTRYLTRNL

SEQ ID NO: 55845 - protein, 743 aa, synthetic construct
MAADGYLPDWLEDNLSEGIREWWALKPGAPQPKANQQHQDNARGLVLPGYKYLGPGNGLDKGEPVNAADAAALEHDKAYDQQLKAGDNPYLKYNHADAEFQERLKEDTSFGGNLGRAVFQAKKRLLEPLGLVEEAAKTAPGKKRPVEQSPQEPDSSAGIGKSGAQPAKKRLNFGQTGDTESVPDPQPIGEPPAAPSGVGSLTMASGGGAPVADNNEGADGVGSSSGNWHCDSQWLGDRVITTSTRTWALPTYNNHLYKQISNSTSGGSSNDNAYFGYSTPWGYFDFNRFHCHFSPRDWQRLINNNWGFRPKRLNFKLFNIQVKEVTDNNGVKTIANNLTSTVQVFTDSDYQLPYVLGSAHEGCLPPFPADVFMIPQYGYLTLNDGSQAVGRSSFYCLEYFPSQMLRTGNNFQFSYEFENVPFHSSYAHSQSLDRLMNPLIDQYLYYLSKTINGSGQNQQTLKFSVAGPSNMAVQGRNYIPGPSYRQQRVSTTVTQNNNSEFAWPGASSWALNGRNSLMNPGPAMASHKEGEDRFFPLSGSLIFGKQGTGRDNVDADKVMITNEEEIKTTNPVATESYGQVATNHQSPLQGAVTLRAQAQTGWVQNQGILPGMVWQDRDVYLQGPIWAKIPHTDGNFHPSPLMGGFGMKHPPPQILIKNTPVPADPPTAFNKDKLNSFITQYSTGQVSVEIEWELQKENSKRWNPEIQYTSNYYKSNNVEFAVNTEGVYSEPRPIGTRYLTRNL

SEQ ID NO: 55846 - protein, 743 aa, synthetic construct
MAADGYLPDWLEDNLSEGIREWWALKPGAPQPKANQQHQDNARGLVLPGYKYLGPGNGLDKGEPVNAADAAALEHDKAYDQQLKAGDNPYLKYNHADAEFQERLKEDTSFGGNLGRAVFQAKKRLLEPLGLVEEAAKTAPGKKRPVEQSPQEPDSSAGIGKSGAQPAKKRLNFGQTGDTESVPDPQPIGEPPAAPSGVGSLTMASGGGAPVADNNEGADGVGSSSGNWHCDSQWLGDRVITTSTRTWALPTYNNHLYKQISNSTSGGSSNDNAYFGYSTPWGYFDFNRFHCHFSPRDWQRLINNNWGFRPKRLNFKLFNIQVKEVTDNNGVKTIANNLTSTVQVFTDSDYQLPYVLGSAHEGCLPPFPADVFMIPQYGYLTLNDGSQAVGRSSFYCLEYFPSQMLRTGNNFQFSYEFENVPFHSSYAHSQSLDRLMNPLIDQYLYYLSKTINGSGQNQQTLKFSVAGPSNMAVQGRNYIPGPSYRQQRVSTTVTQNNNSEFAWPGASSWALNGRNSLMNPGPAMASHKEGEDRFFPLSGSLIFGKQGTGRDNVDADKVMITNEEEIKTTNPVATESYGQVATNHQSPLQGAVHLRAQAQTGWVQNQGILPGMVWQDRDVYLQGPIWAKIPHTDGNFHPSPLMGGFGMKHPPPQILIKNTPVPADPPTAFNKDKLNSFITQYSTGQVSVEIEWELQKENSKRWNPEIQYTSNYYKSNNVEFAVNTEGVYSEPRPIGTRYLTRNL

SEQ ID NO: 55847 - protein, 743 aa, synthetic construct
MAADGYLPDWLEDNLSEGIREWWALKPGAPQPKANQQHQDNARGLVLPGYKYLGPGNGLDKGEPVNAADAAALEHDKAYDQQLKAGDNPYLKYNHADAEFQERLKEDTSFGGNLGRAVFQAKKRLLEPLGLVEEAAKTAPGKKRPVEQSPQEPDSSAGIGKSGAQPAKKRLNFGQTGDTESVPDPQPIGEPPAAPSGVGSLTMASGGGAPVADNNEGADGVGSSSGNWHCDSQWLGDRVITTSTRTWALPTYNNHLYKQISNSTSGGSSNDNAYFGYSTPWGYFDFNRFHCHFSPRDWQRLINNNWGFRPKRLNFKLFNIQVKEVTDNNGVKTIANNLTSTVQVFTDSDYQLPYVLGSAHEGCLPPFPADVFMIPQYGYLTLNDGSQAVGRSSFYCLEYFPSQMLRTGNNFQFSYEFENVPFHSSYAHSQSLDRLMNPLIDQYLYYLSKTINGSGQNQQTLKFSVAGPSNMAVQGRNYIPGPSYRQQRVSTTVTQNNNSEFAWPGASSWALNGRNSLMNPGPAMASHKEGEDRFFPLSGSLIFGKQGTGRDNVDADKVMITNEEEIKTTNPVATESYGQVATNHQSPTQGAVTLRAQAQTGWVQNQGILPGMVWQDRDVYLQGPIWAKIPHTDGNFHPSPLMGGFGMKHPPPQILIKNTPVPADPPTAFNKDKLNSFITQYSTGQVSVEIEWELQKENSKRWNPEIQYTSNYYKSNNVEFAVNTEGVYSEPRPIGTRYLTRNL

SEQ ID NO: 55848 - protein, 11 aa, Adeno-associated virus 9
SYGQVATNHQS

SEQ ID NO: 55849 - protein, 11 aa, synthetic construct
  VARIANT 1: note = Any amino acid
  VARIANT 4: note = Any amino acid
  VARIANT 9: note = Any amino acid
XYGXVATNXQS

SEQ ID NO: 55850 - protein, 13 aa, Adeno-associated virus 9
AQAQTGWVQNQGI

SEQ ID NO: 55851 - protein, 13 aa, synthetic construct
  VARIANT 7: note = Any amino acid
  VARIANT 9: note = Any amino acid
  VARIANT 10: note = Any amino acid
  VARIANT 13: note = Any amino acid
AQAQTGXVXXQGX

SEQ ID NO: 55852 - protein, 33 aa, synthetic construct
  VARIANT 1: note = Any amino acid
  VARIANT 4: note = Any amino acid
  VARIANT 9: note = Any amino acid
  VARIANT 27: note = Any amino acid
  VARIANT 29: note = Any amino acid
  VARIANT 30: note = Any amino acid
  VARIANT 33: note = Any amino acid
XYGXVATNXQSPLMGAVHLYAQAQTGXVXXQGX

SEQ ID NO: 55853 - protein, 101 aa, synthetic construct
  VARIANT 2: note = Any amino acid
  VARIANT 10: note = Any amino acid
  VARIANT 12: note = Any amino acid
  VARIANT 13: note = Any amino acid
  VARIANT 17: note = Any amino acid
  VARIANT 19: note = Any amino acid
  VARIANT 38: note = Any amino acid
  VARIANT 41: note = Any amino acid
  VARIANT 46: note = Any amino acid
  VARIANT 50: note = Any amino acid
  VARIANT 51: note = Any amino acid
  VARIANT 52: note = Any amino acid
  VARIANT 53: note = Any amino acid
  VARIANT 54: note = Any amino acid
  VARIANT 57: note = Any amino acid
  VARIANT 59: note = Any amino acid
  VARIANT 60: note = Any amino acid
  VARIANT 63: note = Any amino acid
  VARIANT 90: note = Any amino acid
GXLIFGKQGXGXXNVDXDXVMITNEEEIKTTNPVATEXYGXVATNXQSAXXXXXTGXVXXQGXLPGMVWQDRDVYLQGPIWAKIPHTDGXFHPSPLMGGFG

SEQ ID NO: 55854 - protein, 7 aa, synthetic construct
PTQGTVR

SEQ ID NO: 55855 - protein, 7 aa, synthetic construct
PSQGTLR

SEQ ID NO: 55856 - protein, 7 aa, synthetic construct
PTQGTLR

SEQ ID NO: 55857 - protein, 9 aa, synthetic construct
PTQGGTRVH

SEQ ID NO: 55858 - protein, 9 aa, synthetic construct
PTQGGTKLR

SEQ ID NO: 55859 - protein, 9 aa, synthetic construct
PTQGGTKLK

SEQ ID NO: 55860 - protein, 11 aa, synthetic construct
  VARIANT 1: note = E or S
  VARIANT 4: note = T or Q
  VARIANT 9: note = L or H
XYGXVATNXQS

SEQ ID NO: 55861 - protein, 13 aa, synthetic construct
  VARIANT 7: note = T or W
  VARIANT 9: note = N or Q
  VARIANT 10: note = S or N
  VARIANT 13: note = A or I
AQAQTGXVXXQGX

SEQ ID NO: 55862 - protein, 33 aa, synthetic construct; identical to SEQ ID NO: 55852
  VARIANT 1: note = E or S
  VARIANT 4: note = T or Q
  VARIANT 9: note = L or H
  VARIANT 27: note = T or W
  VARIANT 29: note = N or Q
  VARIANT 30: note = S or N
  VARIANT 33: note = A or I

SEQ ID NO: 55863 - DNA, 17 bp, synthetic construct
  source 1..17: mol_type = other DNA
gcttctggcgtgtgacc

SEQ ID NO: 55864 - DNA, 23 bp, synthetic construct
  source 1..23: mol_type = other DNA
tgatgagacagcacaataaccag

SEQ ID NO: 55865 - DNA, 14 bp, synthetic construct
  source 1..14: mol_type = other DNA
  modified_base 1: mod_base = OTHER; note = Nucleotide modified with a ZEN quencher attached to a nucleotide sequence
  modified_base 14: mod_base = OTHER; note = 3' Iowa Black FQ modified nucleotide
gctcctgggcaacg

SEQ ID NO: 55866 - DNA, 17 bp, synthetic construct
  source 1..17: mol_type = other DNA
gaacctgaaacttcaca

SEQ ID NO: 55867 - DNA, 19 bp, synthetic construct
  source 1..19: mol_type = other DNA
ccatttaaggagtggttat

SEQ ID NO: 55868 - DNA, 15 bp, synthetic construct
  source 1..15: mol_type = other DNA
  modified_base 1: mod_base = OTHER; note = Nucleotide modified with a ZEN quencher attached to a nucleotide sequence
  modified_base 15: mod_base = OTHER; note = 3' Iowa Black FQ modified nucleotide
cgcactaccacttac

SEQ ID NO: 55869 - DNA, 17 bp, synthetic construct
  source 1..17: mol_type = other DNA
cacagctcctgggcaac

SEQ ID NO: 55870 - DNA, 17 bp, synthetic construct
  source 1..17: mol_type = other DNA
agctcgaccaggatggg

SEQ ID NO: 55871 - DNA, 11 bp, synthetic construct
  source 1..11: mol_type = other DNA
  modified_base 1: mod_base = OTHER; note = Nucleotide modified with a ZEN quencher attached to a nucleotide sequence
  modified_base 11: mod_base = OTHER; note = 3' Iowa Black FQ modified nucleotide
aagggcgagga

SEQ ID NO: 55872 - DNA, 18 bp, synthetic construct
  source 1..18: mol_type = other DNA
gcgggttctgacctgaag

SEQ ID NO: 55873 - DNA, 23 bp, synthetic construct
  source 1..23: mol_type = other DNA
tccctgtacaatcggtaaagttg

SEQ ID NO: 55874 - DNA, 16 bp, synthetic construct
  source 1..16: mol_type = other DNA
  modified_base 1: mod_base = OTHER; note = Nucleotide modified with a ZEN quencher attached to a nucleotide sequence
  modified_base 16: mod_base = OTHER; note = 3' Iowa Black FQ modified nucleotide
ttggctattcagttgt

SEQ ID NO: 55875 - protein, 15 aa, Adeno-associated virus 9
TNHQSAQAQAQTGWV

SEQ ID NO: 55876 - protein, 15 aa, synthetic construct
TNLQSANTAPATGTV

SEQ ID NO: 55877 - protein, 22 aa, synthetic construct
TNLQSPLNGAVHLYTAPATGTV

SEQ ID NO: 55878 - protein, 22 aa, synthetic construct
TNLQPLNGAVHLYNTAPATGTV

SEQ ID NO: 55879 - protein, 22 aa, synthetic construct
TNLPLNGAVHLYANTAPATGTV

SEQ ID NO: 55880 - protein, 22 aa, synthetic construct
TNLQSAPLNGAVHLYAPATGTV

SEQ ID NO: 55881 - protein, 24 aa, synthetic construct
TNLQSPLNGAVHLYANTAPATGTV

SEQ ID NO: 55882 - protein, 101 aa, synthetic construct
GVLIFGKQGAGNSNVDLDNVMITNEEEIKTTNPVATEEYGTVATNLQSANTAPATGTVNSQGALPGMVWQDRDVYLQGPIWAKIPHTDGHFHPSPLMGGFG

SEQ ID NO: 55883 - protein, 101 aa, synthetic construct
GSLIFGKQGTGRDNVDADKVMITNEEEIKTTNPVATESYGQVATNHQSAQAQAQTGWVQNQGILPGMVWQDRDVYLQGPIWAKIPHTDGNFHPSPLMGGFG

SEQ ID NO: 55884 - protein, 101 aa, Adeno-associated virus 9
GSLIFGKQGTGRDNVDADKVMITNEEEIKTTNPVATESYGQVATNHQSPLNGAVHLYAQAQTGWVQNQGILPGMVWQDRDVYLQGPIWAKIPHTDGNFHPS

SEQ ID NO: 55885 - protein, 94 aa, Adeno-associated virus 9
GSLIFGKQGTGRDNVDADKVMITNEEEIKTTNPVATESYGQVATNHQSAQAQAQTGWVQNQGILPGMVWQDRDVYLQGPIWAKIPHTDGNFHPS

SEQ ID NO: 55886 - protein, 101 aa, synthetic construct
GVLIFGKQGAGNSNVDLDNVMITNEEEIKTTNPVATESYGQVATNHQSPLNGAVHLYAQAQTGWVQNQGILPGMVWQDRDVYLQGPIWAKIPHTDGHFHPS

SEQ ID NO: 55887 - protein, 22 aa, synthetic construct
TNHQSPLQGAVHLYAQAQTGWV

SEQ ID NO: 55888 - protein, 22 aa, synthetic construct
TNHQSPLQGAVRLYAQAQTGWV

SEQ ID NO: 55889 - protein, 22 aa, synthetic construct
TNHQSPLQGAVKLYAQAQTGWV

SEQ ID NO: 55890 - protein, 22 aa, synthetic construct
TNHQSPINGAVHLYAQAQTGWV

SEQ ID NO: 55891 - protein, 22 aa, synthetic construct
TNHQSPVNGAVHLYAQAQTGWV

SEQ ID NO: 55892 - protein, 22 aa, synthetic construct
TNHQSPANGAVHLYAQAQTGWV

SEQ ID NO: 55893 - protein, 22 aa, synthetic construct
TNHQSPTNGTVRLYAQAQTGWV

SEQ ID NO: 55894 - protein, 22 aa, synthetic construct
TNHQSPTNGTVHLYAQAQTGWV

SEQ ID NO: 55895 - protein, 22 aa, synthetic construct
TNHQSPTNGTVKLYAQAQTGWV

SEQ ID NO: 55896 - protein, 22 aa, synthetic construct
TNHQSPSNGTLRLYAQAQTGWV

SEQ ID NO: 55897 - protein, 22 aa, synthetic construct
TNHQSPSNGTLHLYAQAQTGWV

SEQ ID NO: 55898 - protein, 22 aa, synthetic construct
TNHQSPSNGTLKLYAQAQTGWV

SEQ ID NO: 55899 - protein, 22 aa, synthetic construct
TNHQSPTNGTLRLYAQAQTGWV

SEQ ID NO: 55900 - protein, 22 aa, synthetic construct
TNHQSPTNGTLHLYAQAQTGWV

SEQ ID NO: 55901 - protein, 22 aa, synthetic construct
TNHQSPTNGTLKLYAQAQTGWV

SEQ ID NO: 55902 - protein, 22 aa, synthetic construct
TNHQSPTQGAVTVRAQAQTGWV

SEQ ID NO: 55903 - protein, 22 aa, synthetic construct
TNHQSPLQGAVTVRAQAQTGWV

SEQ ID NO: 55904 - protein, 22 aa, synthetic construct
TNHQSPLQGAVHVRAQAQTGWV

SEQ ID NO: 55905 - protein, 22 aa, synthetic construct
TNHQSPLQGAVHVYAQAQTGWV

SEQ ID NO: 55906 - protein, 22 aa, synthetic construct
TNHQSPSQGAVTLRAQAQTGWV

SEQ ID NO: 55907 - protein, 22 aa, synthetic construct
TNHQSPLQGAVTLRAQAQTGWV

SEQ ID NO: 55908 - protein, 22 aa, synthetic construct
TNHQSPLQGAVHLRAQAQTGWV

SEQ ID NO: 55909 - protein, 22 aa, synthetic construct
TNHQSPTQGAVTLRAQAQTGWV

SEQ ID NO: 55910 - protein, 22 aa, synthetic construct
  VARIANT 6: note = P or G
  VARIANT 7: note = L, T, S, A, V, or I
  VARIANT 8: note = N, Q, or P
  VARIANT 9: note = G or A
  VARIANT 10: note = A, T, S, V, or G
  VARIANT 11: note = V, L, A, I, G, S, or T
  VARIANT 12: note = H, R, or K
  VARIANT 13: note = L or V
  VARIANT 14: note = Y, R, H, K, or F
TNHQSXXXXXXXXXAQAQTGWV

SEQ ID NO: 55911 - protein, 736 aa, synthetic construct
MAADGYLPDWLEDNLSEGIREWWDLKPGAPKPKANQQKQDDGRGLVLPGYKYLGPFNGLDKGEPVNAADAAALEHDKAYDQQLKAGDNPYLRYNHADAEFQERLQEDTSFGGNLGRAVFQAKKRVLEPLGLVEEGAKTAPGKKRPVEQSPQEPDSSSGIGKKGQQPAKKRLNFGQTGDSESVPDPQPLGEPPAAPSGVGSNTMASGGGAPMADNNEGADGVGNASGNWHCDSTWLGDRVITTSTRTWALPTYNNHLYKQISSQSGASTNDNTYFGYSTPWGYFDFNRFHCHFSPRDWQRLINNNWGFRPKRLNFKLFNIQVKEVTTNDGTTTIANNLTSTVQVFTDSEYQLPYVLGSAHQGCLPPFPADVFMIPQYGYLTLNNGSQAVGRSSFYCLEYFPSQMLRTGNNFQFSYTFEDVPFHSSYAHSQSLDRLMNPLIDQYLYYLSRTQTTSGTAGNRELQFSQAGPSSMANQAKNWLPGPCYRQQRVSKTTNQNNNSNFAWTGATKYHLNGRDSLVNPGPAMATHKDDEDKFFPMSGVLIFGKQGAGNSNVDLDNVMITSEEEIKTTNPVATEEYGTVATNLQSSNTAPATGTVNSQGALPGMVWQDRDVYLQGPIWAKIPHTDGHFHPSPLMGGFGLKHPPPQILIKNTPVPANPPTTFSPAKFASFITQYSTGQVSVEIEWELQKENSKRWNPEIQYTSNYNKSTNVDFAVDTNGVYSEPRPIGTRYLTRNL

SEQ ID NO: 55912 - protein, 737 aa, synthetic construct
MAADGYLPDWLEDNLSEGIREWWDLKPGAPKPKANQQKQDDGRGLVLPGYKYLGPFNGLDKGEPVNAADAAALEHDKAYDQQLKAGDNPYLRYNHADAEFQERLQEDTSFGGNLGRAVFQAKKRVLEPLGLVEEGAKTAPGKKRPVEQSPQEPDSSTGIGKKGQQPAKKRLNFGQTGDSESVPDPQPLGEPPAAPSGVGSNTMAAGGGAPMADNNEGADGVGNASGNWHCDSTWLGDRVITTSTRTWALPTYNNHLYKQISNSQSGGSTNDNTYFGYSTPWGYFDFNRFHCHFSPRDWQRLINNNWGFRPKRLNFKLFNIQVKEVTTNDGTTTIANNLTSTVQVFTDSEYQLPYVLGSAHQGCLPPFPADVFMIPQYGYLTLNNGSQAVGRSSFYCLEYFPSQMLRTGNNFEFSYTFEDVPFHSSYAHSQSLDRLMNPLIDQYLYYLSRTQTTGGTAGNRTLQFSQAGPSSMANQAKNWLPGPCYRQQRVSKTTNQNNNSNFAWTGATKYHLNGRDSLVNPGVAMATHKDDEDRFFPSSGVLIFGKQGAGNDNVDLDNVMITSEEEIKTTNPVATEEYGVVATNLQSANTAPQTGTVNSQGALPGMVWQNRDVYLQGPIWAKIPHTDGNFHPSPLMGGFGLKHPPPQILIKNTPVPANPPTTFSPAKFASFITQYSTGQVSVEIEWELQKENSKRWNPEIQYTSNYNKSTNVDFAVDTEGVYSEPRPIGTRYLTRNL

SEQ ID NO: 55913 - protein, 738 aa, synthetic construct
MAADGYLPDWLEDNLSEGIREWWDLKPGAPKPKANQQKQDDGRGLVLPGYKYLGPFNGLDKGEPVNAADAAALEHDKAYDQQLKAGDNPYLRYNHADAEFQERLQEDTSFGGNLGRAVFQAKKRVLEPLGLVEEGAKTAPGKKRPVEQSPQREPDSSTGIGKKGQQPAKKRLNFGQTGDSESVPDPQPLGEPPAAPSGVGSNTMAAGGGAPMADNNEGADGVGNSSGNWHCDSTWLGDRVITTSTRTWALPTYNNHLYKQISNGTSGGSTNDNTYFGYSTPWGYFDFNRFHCHFSPRDWQRLINNNWGFRPKRLNFKLFNIQVKEVTTNEGTKTIANNLTSTVQVFTDSEYQLPYVLGSAHQGCLPPFPADVFMIPQYGYLTLNNGSQAVGRSSFYCLEYFPSQMLRTGNNFQFSYTFEDVPFHSSYAHSQSLDRLMNPLIDQYLYYLSRTQTTGGTAGTQTLQFSQAGPSSMANQAKNWLPGPCYRQQRVSTTTNQNNNSNFAWTGATKYHLNGRDSLVNPGVAMATHKDDEDRFFPSSGVLIFGKQGAGNDNVDYSNVMITSEEEIKTTNPVATEEYGVVATNLQSANTAPQTGTVNSQGALPGMVWQNRDVYLQGPIWAKIPHTDGNFHPSPLMGGFGLKHPPPQILIKNTPVPADPPTTFNQAKLNSFITQYSTGQVSVEIEWELQKENSKRWNPEIQYTSNYYKSTNVDFAVNTEGVYSEPRPIGTRYLTRNL

SEQ ID NO: 55914 - protein, 738 aa, synthetic construct; identical to SEQ ID NO: 151

SEQ ID NO: 55915 - protein, 738 aa, synthetic construct
MAADGYLPDWLEDNLSEGIREWWDLKPGAPKPKANQQKQDDGRGLVLPGYKYLGPFNGLDKGEPVNAADAAALEHDKAYDQQLKAGDNPYLRYNHADAEFQERLQEDTSFGGNLGRAVFQAKKRVLEPLGLVEEGAKTAPGKKRPVEQSPQREPDSSTGIGKKGQQPARKRLNFGQTGDSESVPDPQPLGEPPAAPSGVGSNTMAAGGGAPMADNNEGADGVGSSSGNWHCDSTWLGDRVITTSTRTWALPTYNNHLYKQISNGTSGGSTNDNTYFGYSTPWGYFDFNRFHCHFSPRDWQRLINNNWGFRPKRLNFKLFNIQVKEVTQNEGTKTIANNLTSTIQVFTDSEYQLPYVLGSAHQGCLPPFPADVFMIPQYGYLTLNNGSQAVGRSSFYCLEYFPSQMLRTGNNFQFSYTFEDVPFHSSYAHSQSLDRLMNPLIDQYLYYLSRTQTTGGTAGTQTLQFSQAGPSNMANQAKNWLPGPCYRQQRVSTTTSQNNNSNFAWTGATKYHLNGRDSLVNPGVAMATHKDDEDRFFPSSGILIFGKQGAGKDNVDYSNVMLTSEEEIKTTNPVATEEYGVVADNLQQQNTAPQIGTVNSQGALPGMVWQNRDVYLQGPIWAKIPHTDGNFHPSPLMGGFGLKHPPPQILIKNTPVPADPPTTFNQAKLNSFITQYSTGQVSVEIEWELQKENSKRWNPEIQYTSNYYKSTNVDFAVNTEGVYSEPRPIGTRYLTRNL

SEQ ID NO: 55916 - protein, 738 aa, synthetic construct
MAADGYLPDWLEDNLSEGIREWWDLKPGAPKPKANQQKQDDGRGLVLPGYKYLGPFNGLDKGEPVNAADAAALEHDKAYDQQLKAGDNPYLRYNHADAEFQERLQEDTSFGGNLGRAVFQAKKRVLEPLGLVEEGAKTAPGKKRPVEPSPQRSPDSSTGIGKKGQQPARKRLNFGQTGDSESVPDPQPIGEPPAAPSGVGSGTMAAGGGAPMADNNEGADGVGSSSGNWHCDSTWLGDRVITTSTRTWALPTYNNHLYKQISNGTSGGSTNDNTYFGYSTPWGYFDFNRFHCHFSPRDWQRLINNNWGFRPKRLNFKLFNIQVKEVTQNEGTKTIANNLTSTIQVFTDSEYQLPYVLGSAHQGCLPPFPADVFMIPQYGYLTLNNGSQAVGRSSFYCLEYFPSQMLRTGNNFEFSYTFEDVPFHSSYAHSQSLDRLMNPLIDQYLYYLSRTQSTGGTAGTQQLLFSQAGPSNMSAQAKNWLPGPCYRQQRVSTTLSQNNNSNFAWTGATKYHLNGRDSLVNPGVAMATHKDDEDRFFPSSGILMFGKQGAGKDNVDYSNVMLTSEEEIKTTNPVATEQYGVVADNLQQQNTAPIVGAVNSQGALPGMVWQNRDVYLQGPIWAKIPHTDGNFHPSPLMGGFGLKHPPPQILIKNTPVPADPPTTFNQAKLNSFITQYSTGQVSVEIEWELQKENSKRWNPEIQYTSNYYKSTNVDFAVNTEGVYSEPRPIGTRYLTRNL

SEQ ID NO: 55917 - protein, 738 aa, synthetic construct
MAADGYLPDWLEDNLSEGIREWWDLKPGAPKPKANQQKQDDGRGLVLPGYKYLGPFNGLDKGEPVNAADAAALEHDKAYDQQLKAGDNPYLRYNHADAEFQERLQEDTSFGGNLGRAVFQAKKRVLEPLGLVEEGAKTAPGKKRPVEPSPQRSPDSSTGIGKKGQQPAKKRLNFGQTGDSESVPDPQPIGEPPAGPSGLGSGTMAAGGGAPMADNNEGADGVGSSSGNWHCDSTWLGDRVITTSTRTWALPTYNNHLYKQISNGTSGGSTNDNTYFGYSTPWGYFDFNRFHCHFSPRDWQRLINNNWGFRPKRLNFKLFNIQVKEVTQNEGTKTIANNLTSTIQVFTDSEYQLPYVLGSAHQGCLPPFPADVFMIPQYGYLTLNNGSQAVGRSSFYCLEYFPSQMLRTGNNFEFSYTFEDVPFHSSYAHSQSLDRLMNPLIDQYLYYLSRTQSTGGTAGTQQLLFSQAGPSNMSAQAKNWLPGPCYRQQRVSTTLSQNNNSNFAWTGATKYHLNGRDSLVNPGVAMATHKDDEERFFPSSGVLMFGKQGAGKDNVDYSSVMLTSEEEIKTTNPVATEQYGVVADNLQQQNTAPIVGAVNSQGALPGMVWQNRDVYLQGPIWAKIPHTDGNFHPSPLMGGFGLKHPPPQILIKNTPVPADPPTTFSQAKLASFITQYSTGQVSVEIEWELQKENSKRWNPEIQYTSNYYKSTNVDFAVNTEGTYSEPRPIGTRYLTRNL

SEQ ID NO: 55918 - protein, 736 aa, synthetic construct
MAADGYLPDWLEDNLSEGIREWWDLKPGAPKPKANQQKQDDGRGLVLPGYKYLGPFNGLDKGEPVNAADAAALEHDKAYDQQLKAGDNPYLRYNHADAEFQERLQEDTSFGGNLGRAVFQAKKRVLEPLGLVEEGAKTAPGKKRPVEQSPQEPDSSSGIGKTGQQPAKKRLNFGQTGDSESVPDPQPLGEPPAAPSGVGSNTMASGGGAPMADNNEGADGVGNSSGNWHCDSTWLGDRVITTSTRTWALPTYNNHLYKQISNGTSGGSTNDNTYFGYSTPWGYFDFNRFHCHFSPRDWQRLINNNWGFRPKRLNFKLFNIQVKEVTTNEGTKTIANNLTSTVQVFTDSEYQLPYVLGSAHQGCLPPFPADVFMIPQYGYLTLNNGSQAVGRSSFYCLEYFPSQMLRTGNNFQFSYTFEDVPFHSSYAHSQSLDRLMNPLIDQYLYYLSRTQTTGTAGTQTLQFSQAGPSSMANQARNWVPGPCYRQQRVSTTTNQNNNSNFAWTGATKYHLNGRDSLMNPGVAMASHKDDEDRFFPSSGVLIFGKQGAGNDNVDYSQVMITNEEEIKTTNPVATEEYGAVATNNQSANTQAQTGLVHNQGVLPGMVWQNRDVYLQGPIWAKIPHTDGNFHPSPLMGGFGLKHPPPQILIKNTPVPADPPTTFNQAKLNSFITQYSTGQVSVEIEWELQKENSKRWNPEIQYTSNYYKSTNVDFAVNTEGVYSEPRPIGTRYLTRNL

SEQ ID NO: 55919 - protein, 737 aa, synthetic construct
MAADGYLPDWLEDNLSEGIREWWDLKPGAPKPKANQQKQDDGRGLVLPGYKYLGPFNGLDKGEPVNAADAAALEHDKAYDQQLKAGDNPYLRYNHADAEFQERLQEDTSFGGNLGRAVFQAKKRVLEPLGLVEEGAKTAPGKKRPVEPSPQRSPDSSTGIGKKGQQPAKKRLNFGQTGDSESVPDPQPLGEPPAAPSGVGSGTMAAGGGAPMADNNEGADGVGNASGNWHCDSTWLGDRVITTSTRTWALPTYNNHLYKQISSQSAGSTNDNTYFGYSTPWGYFDFNRFHCHFSPRDWQRLINNNWGFRPKKLRFKLFNIQVKEVTTNDGVTTIANNLTSTVQVFSDSEYQLPYVLGSAHQGCLPPFPADVFMIPQYGYLTLNNGSQSVGRSSFYCLEYFPSQMLRTGNNFEFSYTFEDVPFHSSYAHSQSLDRLMNPLIDQYLYYLARTQSTTGGTAGNRELQFYQAGPSTMAEQAKNWLPGPCYRQQRVSKTLDQNNNSNFAWTGATKYHLNGRNSLVNPGVAMATHKDDEDRFFPSSGVLIFGKTGAANKTTLENVLMTNEEEIKTTNPVATEEYGVVSSNLQSANTAPQTQTVNSQGALPGMVWQNRDVYLQGPIWAKIPHTDGNFHPSPLMGGFGLKHPPPQILIKNTPVPANPPEVFTPAKFASFITQYSTGQVSVEIEWELQKENSKRWNPEIQYTSNYDKSTNVDFAVDSEGVYSEPRPIGTRYLTRNL

SEQ ID NO: 55920 - protein, 735 aa, synthetic construct
MAADGYLPDWLEDNLSEGIREWWDLKPGAPKPKANQQKQDDGRGLVLPGYKYLGPFNGLDKGEPVNAADAAALEHDKAYDQQLKAGDNPYLRYNHADAEFQERLQEDTSFGGNLGRAVFQAKKRVLEPLGLVEEGAKTAPGKKRPVEQSPQEPDSSSGIGKSGQQPAKKRLNFGQTGDSESVPDPQPLGEPPAAPSGVGSNTMASGGGAPMADNNEGADGVGNASGNWHCDSTWLGDRVITTSTRTWALPTYNNHLYKQISSQSGASNDNHYFGYSTPWGYFDFNRFHCHFSPRDWQRLINNNWGFRPKRLNFKLFNIQVKEVTTNDGTTTIANNLTSTVQVFTDSEYQLPYVLGSAHQGCLPPFPADVFMIPQYGYLTLNNGSQAVGRSSFYCLEYFPSQMLRTGNNFTFSYTFEDVPFHSSYAHSQSLDRLMNPLIDQYLYYLSRTQTTSGTAQNRELQFSQAGPSSMANQAKNWLPGPCYRQQRVSKTANDNNNSNFAWTGATKYHLNGRDSLVNPGPAMASHKDDEDKFFPMSGVLIFGKQGAGASNVDLDNVMITDEEEIKTTNPVATEQYGTVATNLQSSNTAPATGTVNSQGALPGMVWQDRDVYLQGPIWAKIPHTDGHFHPSPLMGGFGLKHPPPQILIKNTPVPANPPTTFSPAKFASFITQYSTGQVSVEIEWELQKENSKRWNPEIQYTSNYNKSANVDFTVDTNGVYSEPRPIGTRYLTRNL

SEQ ID NO: 55921 - protein, 735 aa, synthetic construct
MAADGYLPDWLEDNLSEGIREWWDLKPGAPQPKANQQHQDDGRGLVLPGYKYLGPFNGLDKGEPVNEADAAALEHDKAYDQQLKAGDNPYLKYNHADAEFQERLQEDTSFGGNLGRAVFQAKKRVLEPLGLVEEAAKTAPGKKRPVEQSPQEPDSSSGIGKSGQQPARKRLNFGQTGDSESVPDPQPLGEPPAAPSGVGSNTMASGGGAPMADNNEGADGVGNSSGNWHCDSTWLGDRVITTSTRTWALPTYNNHLYKQISSQSGASNDNHYFGYSTPWGYFDFNRFHCHFSPRDWQRLINNNWGFRPKKLNFKLFNIQVKEVTQNDGTTTIANNLTSTVQVFTDSEYQLPYVLGSAHQGCLPPFPADVFMIPQYGYLTLNNGSQAVGRSSFYCLEYFPSQMLRTGNNFTFSYTFEDVPFHSSYAHSQSLDRLMNPLIDQYLYYLSRTQTTSGTTQQSRLQFSQAGPSSMAQQAKNWLPGPCYRQQRVSKTANDNNNSNFAWTGATKYHLNGRDSLVNPGPAMASHKDDEEKFFPMHGVLIFGKQGTGASNVDLDNVMITDEEEIRTTNPVATEQYGTVATNLQSSNTAPATGTVNSQGALPGMVWQDRDVYLQGPIWAKIPHTDGHFHPSPLMGGFGLKHPPPQILIKNTPVPANPPTTFSPAKFASFITQYSTGQVSVEIEWELQKENSKRWNPEIQYTSNYNKSVNVDFTVDTNGVYSEPRPIGTRYLTRNL
